(19) United States
(12) Patent Application Publication
(10) Pub. No.: US 2024/0270813 A1
(43) Pub. Date: Aug. 15, 2024

(54) T CELL RECEPTORS (TCRs) TARGETING MINOR HISTOCOMPATIBILITY ANTIGEN HA-1

(71) Applicants: University Of Pittsburgh - Of The Commonwealth System Of Higher Education, Pittsburgh, PA (US); BlueSphere Bio, Inc., Pittsburgh, PA (US)

(72) Inventors: Sawa Ito, Pittsburgh, PA (US); Warren David Shlomchik, Pittsburgh, PA (US); Mark Jay Shlomchik, Pittsburgh, PA (US); Constantinos George Panousis, Pittsburgh, PA (US); Josh Kim, Pittsburgh, PA (US); Erik Martin, Pittsburgh, PA (US); Daniel Wikenheiser, Pittsburgh, PA (US)

(21) Appl. No.: 18/557,647

(22) PCT Filed: May 2, 2022
(86) PCT No.: PCT/US2022/027311

§ 371 Date: Oct. 27, 2023

Related U.S. Application Data
(60) Provisional application No. 63/183,515, filed on May 3, 2021.
(60) Provisional application No. 63/251,261, filed on Oct. 1, 2021.

(51) Int. Cl. C07K 14/725; A61P 35/00; C12N 5/0783; C12N 15/63

(52) U.S. Cl. CPC C07K 14/7051; A61P 35/00; C12N 5/0636; C12N 15/63; C07K 2317/565; C12N 2510/00

(57) ABSTRACT

Provided herein are T cell receptors (TCRs) or antigen-binding fragments thereof, such as those that recognize or bind a hematopoictically-restricted minor histocompatibility antigen, e.g., HA-1. In particular, the present disclosure relates to TCRs that bind or recognize particular HA-1 peptides in the context of a major histocompatibility complex (MHC) molecule. The present disclosure further relates to nucleic acids encoding such TCRs, engineered cells comprising such TCRs, methods of isolating such TCRs, and uses thereof, for example, in cell therapy.

### CROSS-REFERENCE TO RELATED APPLICATIONS

[0001] This application claims the benefit of U.S. Provisional Application No. 63/183,515, filed May 3, 2021, and U.S. Provisional Application No. 63/251,261, filed Oct. 1, 2021, each of which is incorporated herein by reference.

### SEQUENCE LISTING

[0002] The Sequence Listing written in file 578238_SeqListing_ST25. txt is 709 kilobytes in size, was created Apr. 28, 2022, and is hereby incorporated by reference.

### FIELD

[0003] The present disclosure relates in some aspects to T cell receptors (TCRs) or antigen-binding fragments thereof, such as those that recognize or bind a hematopoietically-restricted minor histocompatibility antigen, e.g., HA-1. In particular, the present disclosure relates to TCRs that bind to or recognize particular HA-1 peptides in the context of a major histocompatibility complex (MHC) molecule. The present disclosure further relates to nucleic acids encoding such TCRs, engineered cells comprising such TCRs, methods of isolating such TCRs and uses thereof, for example, in cell therapy.

### BACKGROUND

[0004] Allogeneic hematopoietic stem cell transplantation (alloSCT) may be used for treatment of diseases or conditions such as hematologic malignancies and other nonmalignant conditions. Some subjects may relapse after alloSCT. Improved treatments are necessary to attain an optimal treatment outcome. Provided are embodiments that meet such needs.

### SUMMARY

[0005] Provided herein are TCRs or antigen-binding fragment thereof, comprising: an alpha chain comprising a variable alpha (Vα) region and a beta chain comprising a variable beta (Vβ) region; or a gamma chain comprising a variable gamma (Vγ) region and a delta chain comprising a variable delta (Vδ) region; wherein: the Vα or Vγ region comprises a complementarity determining region 3 (CDR-3) comprising SEQ ID NO:3, and the Vβ or Vδ region comprises a CDR-3 comprising SEQ ID NO:11; the Vα or Vγ region comprises a CDR-3 comprising SEQ ID NO:21, and the Vβ or Vδ region comprises a CDR-3 comprising SEQ ID NO:27; the Vα or Vγ region comprises a CDR-3 comprising SEQ ID NO:37, and the Vβ or Vδ region comprises a CDR-3 comprising SEQ ID NO:43; the Vα or Vγ region comprises a CDR-3 comprising SEQ ID NO:51, and the Vβ or Vδ region comprises a CDR-3 comprising SEQ ID NO:57; the Vα or Vγ region comprises a CDR-3 comprising SEQ ID NO:65, and the Vβ or Vδ region comprises a CDR-3 comprising SEQ ID NO:57; the Vα or Vγ region comprises a CDR-3 comprising SEQ ID NO:78, and the Vβ or Vδ region comprises a CDR-3 comprising SEQ ID NO:84; the Vα or Vγ region comprises a CDR-3 comprising SEQ ID NO:92, and the Vβ or Vδ region comprises a CDR-3 comprising SEQ ID NO:98; the Vα or Vγ region comprises a CDR-3 comprising SEQ ID NO: 106, and the Vβ or Vδ region comprises a CDR-3 comprising SEQ ID NO: 112; the Vα or Vγ region comprises a CDR-3 comprising SEQ ID NO:120, and the Vβ or Vδ region comprises a CDR-3 comprising SEQ ID NO: 126; the Vα or Vγ region comprises a CDR-3 comprising SEQ ID NO:136, and the Vβ or Vδ region comprises a CDR-3 comprising SEQ ID NO:142; the Vα or Vγ region comprises a CDR-3 comprising SEQ ID NO: 152, and the Vβ or Vδ region comprises a CDR-3 comprising SEQ ID NO:158; the Vα or Vγ region comprises a CDR-3 comprising SEQ ID NO:166, and the Vβ or Vδ region comprises a CDR-3 comprising SEQ ID NO: 172; the Vα or Vγ region comprises a CDR-3 comprising SEQ ID NO:180, and the Vβ or Vδ region comprises a CDR-3 comprising SEQ ID NO:186; the Vα or Vγ region comprises a CDR-3 comprising SEQ ID NO:194, and the Vβ or Vδ region comprises a CDR-3 comprising SEQ ID NO:200; the Vα or Vγ region comprises a CDR-3 comprising SEQ ID NO:208, and the Vβ or Vδ region comprises a CDR-3 comprising SEQ ID NO:214; the Vα or Vγ region comprises a CDR-3 comprising SEQ ID NO:224, and the Vβ or Vδ region comprises a CDR-3 comprising SEQ ID NO:230; the Vα or Vγ region comprises a CDR-3 comprising SEQ ID NO:238, and the Vβ or Vδ region comprises a CDR-3 comprising SEQ ID NO:244; the Vα or Vγ region comprises a CDR-3 comprising SEQ ID NO:252, and the Vβ or Vδ region comprises a CDR-3 comprising SEQ ID NO:258; the Vα or Vγ region comprises a CDR-3 comprising SEQ ID NO:268, and the Vβ or Vδ region comprises a CDR-3 comprising SEQ ID NO: 158; the Vα or Vγ region comprises a CDR-3 comprising SEQ ID NO:278, and the Vβ or Vδ region comprises a CDR-3 comprising SEQ ID NO:284; the Vα or Vγ region comprises a CDR-3 comprising SEQ ID NO:359, and the Vβ or Vδ region comprises a CDR-3 comprising SEQ ID NO:363; the Vα or Vγ region comprises a CDR-3 comprising SEQ ID NO:369, and the Vβ or Vo region comprises a CDR-3 comprising SEQ ID NO:373; the Vα or Vγ region comprises a CDR-3 comprising SEQ ID NO:379, and the Vβ or Vδ region comprises a CDR-3 comprising SEQ ID NO:383; the Vα or Vγ region comprises a CDR-3 comprising SEQ ID NO:389, and the Vβ or Vδ region comprises a CDR-3 comprising SEQ ID NO:393; the Vα or Vγ region comprises a CDR-3 comprising SEQ ID NO:399, and the Vβ or Vδ region comprises a CDR-3 comprising SEQ ID NO:403; the Vα or Vγ region comprises a CDR-3 comprising SEQ ID NO:409, and the Vβ or Vδ region comprises a CDR-3 comprising SEQ ID NO:413; the Vα or Vγ region comprises a CDR-3 comprising SEQ ID NO:419, and the Vβ or Vδ region comprises a CDR-3 comprising SEQ ID NO:423; the Vα or Vγ region comprises a CDR-3 comprising SEQ ID NO:429, and the Vβ or Vδ region comprises a CDR-3 comprising SEQ ID NO:433; the Vα or Vγ region comprises a CDR-3 comprising SEQ ID NO:439, and the Vβ or Vδ region comprises a CDR-3 comprising SEQ ID NO:443; the Vα or Vγ region comprises a CDR-3 comprising SEQ ID NO:449, and the Vβ or Vδ region comprises a CDR-3 comprising SEQ ID NO:453; or the Vα or Vγ region comprises a CDR-3 comprising SEQ ID NO:480, and the Vβ or Vδ region comprises a CDR-3 comprising SEQ ID NO:484.

[0006] Provided herein are TCRs or antigen-binding fragments thereof, comprising: an alpha chain comprising a variable alpha (Vα) region and a beta chain comprising a variable beta (Vβ) region; or a gamma chain comprising a variable gamma (Vγ) region and a delta chain comprising a variable delta (Vδ) region; wherein: the Vα or Vγ region comprises a complementarity determining region 3 (CDR-3) comprising AVRXAXBRTSGTYKYI (SEQ ID NO:476), and the Vβ or Vδ region comprises a CDR-3 comprising ASSXCXDXEGXFXGQF (SEQ ID NO:478), wherein each of X_{A}, X_{B}, X_{C}, X_{D}, X_{E}, X_{F}, X_{G} can by any amino acid. In some embodiments, X_{A} can be an aliphatic amino acid (i.e., Ala, Ile, Leu, Val, or Pro), glycine, a sulfur-containing amino acid (i.e., Cys or Met), a hydroxyl amino acid (i.e., Ser or Thr), or an acidic residue (i.e., Asp or Glu). In some embodiments, X_{A} can be Ala, Gly, Cys, Ser, Thr, Val, Asp, or Glu. In some embodiments, X_{B} can be a cyclic imino group-containing amino acid or a hydroxyl amino acid. In some embodiments, X_{B} can be Pro, Ser, or Thr. In some embodiments, X_{C} can be an aliphatic amino acid or an aromatic amino acid (i.e., Phe, Tyr, or Trp). In some embodiments, X_{C} can be Leu or Phe. In some embodiments, X_{D} can be an aliphatic amino acid. In some embodiments, X_{D} can be Val or Leu. In some embodiments, X_{E} can be a hydroxyl amino acid, an aliphatic amino acid or an amide amino acid (i.e., Asn or Gln). In some embodiments, X_{E} can be Ser, Ala, Gln, or Asn. In some embodiments, X_{F} can be an acidic amino acid or an amide amino acid. In some embodiments, X_{F} can be Glu or Asn. In some embodiments, X_{G} can be an acid amino acid or a hydroxyl amino acid. In some embodiments, X_{G} can be Glu or Thr. The Vα or Vγ region CDR-3 of any of the described TCRs can be substituted for a CDR-3 comprising SEQ ID NO:476. The Vβ or Vo region CDR-3 of any of the described TCRs can be substituted for a CDR-3 comprising SEQ ID NO:478. For any of the described TCRs, the Vα or Vγ region CDR-3 can be substituted for a CDR-3 comprising SEQ ID NO:476 and the Vβ or Vδ region CDR-3 can be substituted for a CDR-3 comprising SEQ ID NO: 478.

[0007] Provided herein are TCRs or antigen-binding fragments thereof, comprising: an alpha chain comprising a variable alpha (Vα) region and a beta chain comprising a variable beta (Vβ) region; or a gamma chain comprising a variable gamma (Vγ) region and a delta chain comprising a variable delta (Vδ) region; wherein: the Vα or Vγ region comprises a complementarity determining region 3 (CDR-3) comprising SEQ ID NO:459, 460, 461, 462, 463, 464, 476, or 477, and the Vβ or Vδ region comprises a CDR-3 comprising SEQ ID NO:465, 466, 467, 468, 469, 478, or 479. In some embodiments, the Vα or Vγ region comprises a CDR-3 comprising SEQ ID NO:459, and the Vβ or Vδ region comprises a CDR-3 comprising SEQ ID NO:465, 466, 467, 468, 469, 478, or 479; the Vα or Vγ region comprises a CDR-3 comprising SEQ ID NO:460, and the Vβ or Vδ region comprises a CDR-3 comprising SEQ ID NO:465, 466, 467, 468, 469, 478, or 479; the Vα or Vγ region comprises a CDR-3 comprising SEQ ID NO:461, and the Vβ or Vδ region comprises a CDR-3 comprising SEQ ID NO:465, 466, 467, 468, 469, 478, or 479; the Vα or Vγ region comprises a CDR-3 comprising SEQ ID NO:462, and the Vβ or Vδ region comprises a CDR-3 comprising SEQ ID NO:465, 466, 467, 468, 469, 478, or 479; the Vα or Vγ region comprises a CDR-3 comprising SEQ ID NO:463, and the Vβ or Vδ region comprises a CDR-3 comprising SEQ ID NO:465, 466, 467, 468, 469, 478, or 479; the Vα or Vγ region comprises a CDR-3 comprising SEQ ID NO: 464, and the Vβ or Vδ region comprises a CDR-3 comprising SEQ ID NO:465, 466, 467, 468, 469, 478, or 479; the Vα or Vγ region comprises a CDR-3 comprising SEQ ID NO:459, 460, 461, 462, 463, 464, 476, or 477, and the Vβ or Vδ region comprises a CDR-3 comprising SEQ ID NO:465; the Vα or Vγ region comprises a CDR-3 comprising SEQ ID NO:459, 460, 461, 462, 463, 464, 476, or 477, and the Vβ or Vδ region comprises a CDR-3 comprising SEQ ID NO:466; the Vα or Vγ region comprises a CDR-3 comprising SEQ ID NO:459, 460, 461, 462, 463, 464, 476, or 477, and the Vβ or Vδ region comprises a CDR-3 comprising SEQ ID NO:467; the Vα or Vγ region comprises a CDR-3 comprising SEQ ID NO:459, 460, 461, 462, 463, 464, 476, or 477, and the Vβ or Vo region comprises a CDR-3 comprising SEQ ID NO:468; or the Vα or Vγ region comprises a CDR-3 comprising SEQ ID NO:459, 460, 461, 462, 463, 464, 476, or 477, and the Vβ or Vδ region comprises a CDR-3 comprising SEQ ID NO:469. In some embodiments, the TCR or antigen-binding fragment thereof, the Vα or Vγ region contains a CDR-3 comprising SEQ ID NO:463, and the Vβ or Vδ region contains a CDR-3 comprising SEQ ID NO:469. In some embodiments; the Vα or Vγ region comprises: a complementarity determining region 1 (CDR-1) comprising SEQ ID NO:1, and a complementarity determining region 2 (CDR-2) comprising SEQ ID NO:2; a CDR-1 comprising SEQ ID NO: 19, and a CDR-2 comprising SEQ ID NO: 20; a CDR-1 comprising SEQ ID NO: 35, and a CDR-2 comprising SEQ ID NO: 36; a CDR-1 comprising SEQ ID NO: 76, and a CDR-2 comprising SEQ ID NO: 77; a CDR-1 comprising SEQ ID NO: 134, and a CDR-2 comprising SEQ ID NO: 135; a CDR-1 comprising SEQ ID NO: 150, and a CDR-2 comprising SEQ ID NO: 151; a CDR-1 comprising SEQ ID NO: 222, and a CDR-2 comprising SEQ ID NO: 223; or a CDR-1 comprising SEQ ID NO: 266, and a CDR-2 comprising SEQ ID NO: 267; and the Vβ or Vδ region comprises a CDR-1 comprising SEQ ID NO:9, and a CDR-2 comprising SEQ ID NO: 10. In some embodiments, the TCR or antigen binding fragment thereof provided herein has the ability to bind to a peptide epitope of a minor histocompatibility antigen HA-1 in the context of an MHC molecule. The Vα or Vγ region CDR-3 of any of the described TCRs can be substituted for a CDR-3 comprising SEQ ID NO:459, 460, 461, 462, 463, 464, 476, or 477. The Vβ or Vo region CDR-3 of any of the described TCRs can be substituted for a CDR-3 comprising SEQ ID NO:465, 466, 467, 468, 469, 478, or 479. For any of the described TCRs, the Vα or Vγ region CDR-3 can be substituted for a CDR-3 comprising SEQ ID NO:459, 460, 461, 462, 463, 464, 476, or 477, and the Vβ or Vδ region CDR-3 can be substituted for a CDR-3 comprising SEQ ID NO:465, 466, 467, 468, 469, 478, or 479.

[0008] Provided herein are TCRs or antigen-binding fragments thereof, comprising: an alpha chain comprising a Vα region and a beta chain comprising a Vβ region; or a gamma chain comprising a Vγ region and a delta chain comprising a Vδ region; wherein: the Vα or Vγ region comprises a CDR-3 comprising SEQ ID NO:470, and the Vβ or Vδ region comprises a CDR-3 comprising SEQ ID NO:57; the Vα or Vγ region comprises a CDR-3 comprising SEQ ID NO:471, and the Vβ or Vδ region comprises a CDR-3 comprising SEQ ID NO:57; the Vα or Vγ region comprises a CDR-3 comprising SEQ ID NO:472, and the Vβ or Vδ region comprises a CDR-3 comprising SEQ ID NO:57; the Vα or Vγ region comprises a CDR-3 comprising SEQ ID NO:473, and the Vβ or Vδ region comprises a CDR-3 comprising SEQ ID NO:57; or the Vα or Vγ region comprises a CDR-3 comprising SEQ ID NO:474, and the Vβ or Vδ region comprises a CDR-3 comprising SEQ ID NO:475. In some embodiments, the Vα or Vγ region comprises: a complementarity determining region 1 (CDR-1) comprising SEQ ID NO:1, and a complementarity determining region 2 (CDR-2) comprising SEQ ID NO:2; a CDR-1 comprising SEQ ID NO: 19, and a CDR-2 comprising SEQ ID NO: 20; a CDR-1 comprising SEQ ID NO: 35, and a CDR-2 comprising SEQ ID NO: 36; a CDR-1 comprising SEQ ID NO: 76, and a CDR-2 comprising SEQ ID NO: 77; a CDR-1 comprising SEQ ID NO: 134, and a CDR-2 comprising SEQ ID NO: 135; a CDR-1 comprising SEQ ID NO: 150, and a CDR-2 comprising SEQ ID NO: 151; a CDR-1 comprising SEQ ID NO: 222, and a CDR-2 comprising SEQ ID NO: 223; or a CDR-1 comprising SEQ ID NO: 266, and a CDR-2 comprising SEQ ID NO: 267; and the Vβ or Vδ region comprises a CDR-1 comprising SEQ ID NO:9, and a CDR-2 comprising SEQ ID NO:10. In some embodiments, the TCR or antigen binding fragment thereof provided herein has the ability to bind to a peptide epitope of a minor histocompatibility antigen HA-1 in the context of an MHC molecule. In some embodiments, the Vα or Vγ region CDR-3 of TCR D can be substituted for a CDR-3 comprising SEQ ID NO:470, 471, 472, 473, or 474. In some embodiments, the Vβ or Vδ region CDR-3 of TCR D can be substituted for a CDR-3 comprising SEQ ID NO:475. In some embodiments, the Vα or Vγ region CDR-3 of TCR D can be substituted for a CDR-3 comprising SEQ ID NO: 470, 471, 472, 473, or 474, and the Vβ or Vδ region CDR-3 can be substituted for a CDR-3 comprising SEQ ID NO:475.

[0009] In some of any of the embodiments provided herein, the Vα or Vγ region comprises a complementarity determining region 1 (CDR-1) comprising SEQ ID NO:1, and a complementarity determining region 2 (CDR-2) comprising SEQ ID NO:2, and the Vβ or Vδ region comprises a CDR-1 comprising SEQ ID NO:9, and a CDR-2 comprising SEQ ID NO: 10; the Vα or Vγ region comprises a CDR-1 comprising SEQ ID NO:19, and a CDR-2 comprising SEQ ID NO:20, and the Vβ or Vδ region comprises a CDR-1 comprising SEQ ID NO:9, and a CDR-2 comprising SEQ ID NO:10; the Vα or Vγ region comprises a CDR-1 comprising SEQ ID NO:35, and a CDR-2 comprising SEQ ID NO:36, and the Vβ or Vδ region comprises a CDR-1 comprising SEQ ID NO:9, and a CDR-2 comprising SEQ ID NO:10; the Vα or Vγ region comprises a CDR-1 comprising SEQ ID NO:1, and a CDR-2 comprising SEQ ID NO:2, and the Vβ or Vδ region comprises a CDR-1 comprising SEQ ID NO:9, and a CDR-2 comprising SEQ ID NO:10; the Vα or Vγ region comprises a CDR-1 comprising SEQ ID NO:1, and a CDR-2 comprising SEQ ID NO:2, and the Vβ or Vδ region comprises a CDR-1 comprising SEQ ID NO:9, and a CDR-2 comprising SEQ ID NO: 10; the Vα or Vγ region comprises a CDR-1 comprising SEQ ID NO:76, and a CDR-2 comprising SEQ ID NO:77, and the Vβ or Vδ region comprises a CDR-1 comprising SEQ ID NO:9, and a CDR-2 comprising SEQ ID NO: 10; the Vα or Vγ region comprises a CDR-1 comprising SEQ ID NO:19, and a CDR-2 comprising SEQ ID NO:20, and the Vβ or Vδ region comprises a CDR-1 comprising SEQ ID NO:9, and a CDR-2 comprising SEQ ID NO: 10; the Vα or Vγ region comprises a CDR-1 comprising SEQ ID NO:76, and a CDR-2 comprising SEQ ID NO:77, and the Vβ or Vδ region comprises a CDR-1 comprising SEQ ID NO:9, and a CDR-2 comprising SEQ ID NO: 10; the Vα or Vγ region comprises a CDR-1 comprising SEQ ID NO:35, and a CDR-2 comprising SEQ ID NO:36, and the Vβ or Vδ region comprises a CDR-1 comprising SEQ ID NO:9, and a CDR-2 comprising SEQ ID NO: 10; the Vα or Vγ region comprises a CDR-1 comprising SEQ ID NO: 134, and a CDR-2 comprising SEQ ID NO:135, and the Vβ or Vδ region comprises a CDR-1 comprising SEQ ID NO:9, and a CDR-2 comprising SEQ ID NO:10; the Vα or Vγ region comprises a CDR-1 comprising SEQ ID NO: 150, and a CDR-2 comprising SEQ ID NO: 151, and the Vβ or Vδ region comprises a CDR-1 comprising SEQ ID NO:9, and a CDR-2 comprising SEQ ID NO: 10; the Vα or Vγ region comprises a CDR-1 comprising SEQ ID NO:35, and a CDR-2 comprising SEQ ID NO:36, and the Vβ or Vδ region comprises a CDR-1 comprising SEQ ID NO:9, and a CDR-2 comprising SEQ ID NO:10; the Vα or Vγ region comprises a CDR-1 comprising SEQ ID NO:35, and a CDR-2 comprising SEQ ID NO:36, and the Vβ or Vδ region comprises a CDR-1 comprising SEQ ID NO:9, and a CDR-2 comprising SEQ ID NO:10; the Vα or Vγ region comprises a CDR-1 comprising SEQ ID NO:76, and a CDR-2 comprising SEQ ID NO:77, and the Vβ or Vδ region comprises a CDR-1 comprising SEQ ID NO:9, and a CDR-2 comprising SEQ ID NO: 10; the Vα or Vγ region comprises a CDR-1 comprising SEQ ID NO:76, and a CDR-2 comprising SEQ ID NO:77, and the Vβ or Vδ region comprises a CDR-1 comprising SEQ ID NO:9, and a CDR-2 comprising SEQ ID NO: 10; the Vα or Vγ region comprises a CDR-1 comprising SEQ ID NO:222, and a CDR-2 comprising SEQ ID NO:223, and the Vβ or Vδ region comprises a CDR-1 comprising SEQ ID NO:9, and a CDR-2 comprising SEQ ID NO:10; the Vα or Vγ region comprises a CDR-1 comprising SEQ ID NO:76, and a CDR-2 comprising SEQ ID NO:77, and the Vβ or Vδ region comprises a CDR-1 comprising SEQ ID NO:9, and a CDR-2 comprising SEQ ID NO: 10; the Vα or Vγ region comprises a CDR-1 comprising SEQ ID NO: 19, and a CDR-2 comprising SEQ ID NO:20, and the Vβ or Vδ region comprises a CDR-1 comprising SEQ ID NO:9, and a CDR-2 comprising SEQ ID NO:10; the Vα or Vγ region comprises a CDR-1 comprising SEQ ID NO:266, and a CDR-2 comprising SEQ ID NO:267, and the Vβ or Vδ region comprises a CDR-1 comprising SEQ ID NO:9, and a CDR-2 comprising SEQ ID NO: 10; or the Vα or Vγ region comprises a CDR-1 comprising SEQ ID NO:19, and a CDR-2 comprising SEQ ID NO:20, and the Vβ or Vδ region comprises a CDR-1 comprising SEQ ID NO:9, and a CDR-2 comprising SEQ ID NO:10.

[0010] Also provided herein are TCRs or antigen-binding fragment thereof, comprising: an alpha chain comprising a Vα region and a beta chain comprising a Vβ region; or a gamma chain comprising a Vγ region and a delta chain comprising a Vδ region; wherein: the Vα or Vγ region comprises a CDR-1 comprising SEQ ID NO:1, a CDR-2 comprising SEQ ID NO:2, and a CDR-3 comprising SEQ ID NO:3, and the Vβ or Vδ region comprises a CDR-1 comprising SEQ ID NO:9, a CDR-2 comprising SEQ ID NO: 10, and a CDR-3 comprising SEQ ID NO:11; the Vα or Vγ region comprises a CDR-1 comprising SEQ ID NO: 19, a CDR-2 comprising SEQ ID NO:20, and a CDR-3 comprising SEQ ID NO:21, and the Vβ or Vδ region comprises a CDR-1 comprising SEQ ID NO:9, a CDR-2 comprising SEQ ID NO: 10, and a CDR-3 comprising SEQ ID NO:27; the Vα or Vγ region comprises a CDR-1 comprising SEQ ID NO:35, a CDR-2 comprising SEQ ID NO:36, and a CDR-3 comprising SEQ ID NO:37, and the Vβ or Vδ region comprises a CDR-1 comprising SEQ ID NO:9, a CDR-2 comprising SEQ ID NO: 10, and a CDR-3 comprising SEQ ID NO:43; the Vα or Vγ region comprises a CDR-1 comprising SEQ ID NO:1, a CDR-2 comprising SEQ ID NO:2, and a CDR-3 comprising SEQ ID NO:51, and the Vβ or Vδ region comprises a CDR-1 comprising SEQ ID NO:9, a CDR-2 comprising SEQ ID NO: 10, and a CDR-3 comprising SEQ ID NO:57; the Vα or Vγ region comprises a CDR-1 comprising SEQ ID NO:1, a CDR-2 comprising SEQ ID NO:2, and a CDR-3 comprising SEQ ID NO:65, and the Vβ or Vδ region comprises a CDR-1 comprising SEQ ID NO:9, a CDR-2 comprising SEQ ID NO: 10, and a CDR-3 comprising SEQ ID NO:57; the Vα or Vγ region comprises a CDR-1 comprising SEQ ID NO:76, a CDR-2 comprising SEQ ID NO:77, and a CDR-3 comprising SEQ ID NO:78, and the Vβ or Vδ region comprises a CDR-1 comprising SEQ ID NO:9, a CDR-2 comprising SEQ ID NO: 10, and a CDR-3 comprising SEQ ID NO:84; the Vα or Vγ region comprises a CDR-1 comprising SEQ ID NO: 19, a CDR-2 comprising SEQ ID NO:20, and a CDR-3 comprising SEQ ID NO:92, and the Vβ or Vδ region comprises a CDR-1 comprising SEQ ID NO:9, a CDR-2 comprising SEQ ID NO: 10, and a CDR-3 comprising SEQ ID NO:98; the Vα or Vγ region comprises a CDR-1 comprising SEQ ID NO:76, a CDR-2 comprising SEQ ID NO:77, and a CDR-3 comprising SEQ ID NO: 106, and the Vβ or Vδ region comprises a CDR-1 comprising SEQ ID NO:9, a CDR-2 comprising SEQ ID NO:10, and a CDR-3 comprising SEQ ID NO:112; the Vα or Vγ region comprises a CDR-1 comprising SEQ ID NO:35, a CDR-2 comprising SEQ ID NO:36, and a CDR-3 comprising SEQ ID NO: 120, and the Vβ or Vδ region comprises a CDR-1 comprising SEQ ID NO:9, a CDR-2 comprising SEQ ID NO: 10, and a CDR-3 comprising SEQ ID NO: 126; the Vα or Vγ region comprises a CDR-1 comprising SEQ ID NO: 134, a CDR-2 comprising SEQ ID NO: 135, and a CDR-3 comprising SEQ ID NO:136, and the Vβ or Vδ region comprises a CDR-1 comprising SEQ ID NO:9, a CDR-2 comprising SEQ ID NO: 10, and a CDR-3 comprising SEQ ID NO: 142; the Vα or Vγ region comprises a CDR-1 comprising SEQ ID NO:150, a CDR-2 comprising SEQ ID NO:151, and a CDR-3 comprising SEQ ID NO: 152, and the Vβ or Vδ region comprises a CDR-1 comprising SEQ ID NO:9, a CDR-2 comprising SEQ ID NO: 10, and a CDR-3 comprising SEQ ID NO: 158; the Vα or Vγ region comprises a CDR-1 comprising SEQ ID NO:35, a CDR-2 comprising SEQ ID NO:36, and a CDR-3 comprising SEQ ID NO: 166, and the Vβ or Vδ region comprises a CDR-1 comprising SEQ ID NO:9, a CDR-2 comprising SEQ ID NO: 10, and a CDR-3 comprising SEQ ID NO: 172; the Vα or Vγ region comprises a CDR-1 comprising SEQ ID NO:35, a CDR-2 comprising SEQ ID NO:36, and a CDR-3 comprising SEQ ID NO: 180, and the Vβ or Vδ region comprises a CDR-1 comprising SEQ ID NO:9, a CDR-2 comprising SEQ ID NO:10, and a CDR-3 comprising SEQ ID NO: 186; the Vα or Vγ region comprises a CDR-1 comprising SEQ ID NO:76, a CDR-2 comprising SEQ ID NO:77, and a CDR-3 comprising SEQ ID NO: 194, and the Vβ or Vδ region comprises a CDR-1 comprising SEQ ID NO:9, a CDR-2 comprising SEQ ID NO: 10, and a CDR-3 comprising SEQ ID NO:200; the Vα or Vγ region comprises a CDR-1 comprising SEQ ID NO:76, a CDR-2 comprising SEQ ID NO:77, and a CDR-3 comprising SEQ ID NO:208, and the Vβ or Vδ region comprises a CDR-1 comprising SEQ ID NO:9, a CDR-2 comprising SEQ ID NO: 10, and a CDR-3 comprising SEQ ID NO:214; the Vα or Vγ region comprises a CDR-1 comprising SEQ ID NO:222, a CDR-2 comprising SEQ ID NO:223, and a CDR-3 comprising SEQ ID NO:224, and the Vβ or Vδ region comprises a CDR-1 comprising SEQ ID NO:9, a CDR-2 comprising SEQ ID NO: 10, and a CDR-3 comprising SEQ ID NO:230; the Vα or Vγ region comprises a CDR-1 comprising SEQ ID NO:76, a CDR-2 comprising SEQ ID NO:77, and a CDR-3 comprising SEQ ID NO:238, and the Vβ or Vδ region comprises a CDR-1 comprising SEQ ID NO:9, a CDR-2 comprising SEQ ID NO:10, and a CDR-3 comprising SEQ ID NO:244; the Vα or Vγ region comprises a CDR-1 comprising SEQ ID NO:19, a CDR-2 comprising SEQ ID NO:20, and a CDR-3 comprising SEQ ID NO:252, and the Vβ or Vδ region comprises a CDR-1 comprising SEQ ID NO:9, a CDR-2 comprising SEQ ID NO:10, and a CDR-3 comprising SEQ ID NO:258; the Vα or Vγ region comprises a CDR-1 comprising SEQ ID NO:266, a CDR-2 comprising SEQ ID NO:267, and a CDR-3 comprising SEQ ID NO:268, and the Vβ or Vδ region comprises a CDR-1 comprising SEQ ID NO:9, a CDR-2 comprising SEQ ID NO:10, and a CDR-3 comprising SEQ ID NO: 158; or the Vα or Vγ region comprises a CDR-1 comprising SEQ ID NO:19, a CDR-2 comprising SEQ ID NO:20, and a CDR-3 comprising SEQ ID NO:278, and the Vβ or Vδ region comprises a CDR-1 comprising SEQ ID NO:9, a CDR-2 comprising SEQ ID NO:10, and a CDR-3 comprising SEQ ID NO:284.

[0011] Also provided herein are TCRs or antigen-binding fragment thereof, comprising: an alpha chain comprising a Vα region and a beta chain comprising a Vβ region; or a gamma chain comprising a Vγ region and a delta chain comprising a Vδ region; wherein: the Vα or Vγ region comprises a CDR-3 comprising a CDR-3 contained within the Vα or Vγ region sequence of SEQ ID NO:4, and the Vβ or Vδ region comprises a CDR-3 comprising a CDR-3 contained within the Vβ or Vδ region sequence of SEQ ID NO: 12; the Vα or Vγ region comprises a CDR-3 comprising a CDR-3 contained within the Vα or Vγ region sequence of SEQ ID NO:22, and the Vβ or Vδ region comprises a CDR-3 comprising a CDR-3 contained within the Vβ or Vo region sequence of SEQ ID NO:28; the Vα or Vγ region comprises a CDR-3 comprising a CDR-3 contained within the Vα or Vγ region sequence of SEQ ID NO:38, and the Vβ or Vδ region comprises a CDR-3 comprising a CDR-3 contained within the Vβ or Vδ region sequence of SEQ ID NO:44; the Vα or Vγ region comprises a CDR-3 comprising a CDR-3 contained within the Vα or Vγ region sequence of SEQ ID NO:52, and the Vβ or Vδ region comprises a CDR-3 comprising a CDR-3 contained within the Vβ or Vδ region sequence of SEQ ID NO:58; the Vα or Vγ region comprises a CDR-3 comprising a CDR-3 contained within the Vα or Vγ region sequence of SEQ ID NO:66, and the Vβ or Vδ region comprises a CDR-3 comprising a CDR-3 contained within the Vβ or Vδ region sequence of SEQ ID NO:58; the Vα or Vγ region comprises a CDR-3 comprising a CDR-3 contained within the Vα or Vγ region sequence of SEQ ID NO: 79, and the Vβ or Vδ region comprises a CDR-3 comprising a CDR-3 contained within the Vβ or Vδ region sequence of SEQ ID NO:85; the Vα or Vγ region comprises a CDR-3 comprising a CDR-3 contained within the Vα or Vγ region sequence of SEQ ID NO:93, and the Vβ or Vo region comprises a CDR-3 comprising a CDR-3 contained within the Vβ or Vδ region sequence of SEQ ID NO:99; the Vα or Vγ region comprises a CDR-3 comprising a CDR-3 contained within the Vα or Vγ region sequence of SEQ ID NO: 107, and the Vβ or Vδ region comprises a CDR-3 comprising a CDR-3 contained within the Vβ or Vδ region sequence of SEQ ID NO:113; the Vα or Vγ region comprises a CDR-3 comprising a CDR-3 contained within the Vα or Vγ region sequence of SEQ ID NO: 121, and the Vβ or Vδ region comprises a CDR-3 comprising a CDR-3 contained within the Vβ or Vδ region sequence of SEQ ID NO: 127; the Vα or Vγ region comprises a CDR-3 comprising a CDR-3 contained within the Vα or Vγ region sequence of SEQ ID NO: 137, and the Vβ or Vo region comprises a CDR-3 comprising a CDR-3 contained within the Vβ or Vδ region sequence of SEQ ID NO: 143; the Vα or Vγ region comprises a CDR-3 comprising a CDR-3 contained within the Vα or Vγ region sequence of SEQ ID NO:153, and the Vβ or Vo region comprises a CDR-3 comprising a CDR-3 contained within the Vβ or Vδ region sequence of SEQ ID NO: 159; the Vα or Vγ region comprises a CDR-3 comprising a CDR-3 contained within the Vα or Vγ region sequence of SEQ ID NO: 167, and the Vβ or Vδ region comprises a CDR-3 comprising a CDR-3 contained within the Vβ or Vδ region sequence of SEQ ID NO: 173; the Vα or Vγ region comprises a CDR-3 comprising a CDR-3 contained within the Vα or Vγ region sequence of SEQ ID NO: 181, and the Vβ or Vδ region comprises a CDR-3 comprising a CDR-3 contained within the Vβ or Vδ region sequence of SEQ ID NO: 187; the Vα or Vγ region comprises a CDR-3 comprising a CDR-3 contained within the Vα or Vγ region sequence of SEQ ID NO: 195, and the Vβ or Vδ region comprises a CDR-3 comprising a CDR-3 contained within the Vβ or Vδ region sequence of SEQ ID NO:201; the Vα or Vγ region comprises a CDR-3 comprising a CDR-3 contained within the Vα or Vγ region sequence of SEQ ID NO:209, and the Vβ or Vδ region comprises a CDR-3 comprising a CDR-3 contained within the Vβ or Vδ region sequence of SEQ ID NO:215; the Vα or Vγ region comprises a CDR-3 comprising a CDR-3 contained within the Vα or Vγ region sequence of SEQ ID NO:225, and the Vβ or Vδ region comprises a CDR-3 comprising a CDR-3 contained within the Vβ or Vδ region sequence of SEQ ID NO:231; the Vα or Vγ region comprises a CDR-3 comprising a CDR-3 contained within the Vα or Vγ region sequence of SEQ ID NO:239, and the Vβ or Vδ region comprises a CDR-3 comprising a CDR-3 contained within the Vβ or Vδ region sequence of SEQ ID NO:245; the Vα or Vγ region comprises a CDR-3 comprising a CDR-3 contained within the Vα or Vγ region sequence of SEQ ID NO:253, and the Vβ or Vδ region comprises a CDR-3 comprising a CDR-3 contained within the Vβ or Vδ region sequence of SEQ ID NO:259; the Vα or Vγ region comprises a CDR-3 comprising a CDR-3 contained within the Vα or Vγ region sequence of SEQ ID NO:269, and the Vβ or Vδ region comprises a CDR-3 comprising a CDR-3 contained within the Vβ or Vo region sequence of SEQ ID NO: 159; the Vα or Vγ region comprises a CDR-3 comprising a CDR-3 contained within the Vα or Vγ region sequence of SEQ ID NO:279, and the Vβ or Vδ region comprises a CDR-3 comprising a CDR-3 contained within the Vβ or Vδ region sequence of SEQ ID NO:285; the Vα or Vγ region comprises a CDR-3 comprising a CDR-3 contained within the Vα or Vγ region sequence of SEQ ID NO:360, and the Vβ or Vδ region comprises a CDR-3 comprising a CDR-3 contained within the Vβ or Vδ region sequence of SEQ ID NO:364; the Vα or Vγ region comprises a CDR-3 comprising a CDR-3 contained within the Vα or Vγ region sequence of SEQ ID NO:370, and the Vβ or Vδ region comprises a CDR-3 comprising a CDR-3 contained within the Vβ or Vδ region sequence of SEQ ID NO:374; the Vα or Vγ region comprises a CDR-3 comprising a CDR-3 contained within the Vα or Vγ region sequence of SEQ ID NO:380, and the Vβ or Vδ region comprises a CDR-3 comprising a CDR-3 contained within the Vβ or Vδ region sequence of SEQ ID NO:384; the Vα or Vγ region comprises a CDR-3 comprising a CDR-3 contained within the Vα or Vγ region sequence of SEQ ID NO:390, and the Vβ or Vδ region comprises a CDR-3 comprising a CDR-3 contained within the Vβ or Vδ region sequence of SEQ ID NO:394; the Vα or Vγ region comprises a CDR-3 comprising a CDR-3 contained within the Vα or Vγ region sequence of SEQ ID NO:400, and the Vβ or Vδ region comprises a CDR-3 comprising a CDR-3 contained within the Vβ or Vδ region sequence of SEQ ID NO:404; the Vα or Vγ region comprises a CDR-3 comprising a CDR-3 contained within the Vα or Vγ region sequence of SEQ ID NO:410, and the Vβ or Vδ region comprises a CDR-3 comprising a CDR-3 contained within the Vβ or Vδ region sequence of SEQ ID NO:414; the Vα or Vγ region comprises a CDR-3 comprising a CDR-3 contained within the Vα or Vγ region sequence of SEQ ID NO:420, and the Vβ or Vδ region comprises a CDR-3 comprising a CDR-3 contained within the Vβ or Vδ region sequence of SEQ ID NO:424; the Vα or Vγ region comprises a CDR-3 comprising a CDR-3 contained within the Vα or Vγ region sequence of SEQ ID NO:430, and the Vβ or Vo region comprises a CDR-3 comprising a CDR-3 contained within the Vβ or Vδ region sequence of SEQ ID NO:434; the Vα or Vγ region comprises a CDR-3 comprising a CDR-3 contained within the Vα or Vγ region sequence of SEQ ID NO:440, and the Vβ or Vδ region comprises a CDR-3 comprising a CDR-3 contained within the Vβ or Vδ region sequence of SEQ ID NO:444; the Vα or Vγ region comprises a CDR-3 comprising a CDR-3 contained within the Vα or Vγ region sequence of SEQ ID NO:450, and the Vβ or Vδ region comprises a CDR-3 comprising a CDR-3 contained within the Vβ or Vδ region sequence of SEQ ID NO:454; or the Vα or Vγ region comprises a CDR-3 comprising a CDR-3 contained within the Vα or Vγ region sequence of SEQ ID NO:481, and the Vβ or Vδ region comprises a CDR-3 comprising a CDR-3 contained within the Vβ or Vδ region sequence of SEQ ID NO:485.

[0012] In some of any of the embodiments provided herein, the Vα or Vγ region comprises a CDR-1 and a CDR-2 comprising a CDR-1 and a CDR-2, respectively, contained within the Vα or Vγ region sequence of SEQ ID NO:4, and the Vβ or Vδ region comprises a CDR-1 and a CDR-2 comprising a CDR-1 and a CDR-2, respectively, contained within the Vβ or Vδ region sequence of SEQ ID NO: 12; the Vα or Vγ region comprises a CDR-1 and a CDR-2 comprising a CDR-1 and a CDR-2, respectively, contained within the Vα or Vγ region sequence of SEQ ID NO:22, and the Vβ or Vδ region comprises a CDR-1 and a CDR-2 comprising a CDR-1 and a CDR-2, respectively, contained within the Vβ or Vδ region sequence of SEQ ID NO:28; the Vα or Vγ region comprises a CDR-1 and a CDR-2 comprising a CDR-1 and a CDR-2, respectively, contained within the Vα or Vγ region sequence of SEQ ID NO:38, and the Vβ or Vδ region comprises a CDR-1 and a CDR-2 comprising a CDR-1 and a CDR-2, respectively, contained within the Vβ or Vδ region sequence of SEQ ID NO:44; the Vα or Vγ region comprises a CDR-1 and a CDR-2 comprising a CDR-1 and a CDR-2, respectively, contained within the Vα or Vγ region sequence of SEQ ID NO:52, and the Vβ or Vδ region comprises a CDR-1 and a CDR-2 comprising a CDR-1 and a CDR-2, respectively, contained within the Vβ or Vδ region sequence of SEQ ID NO:58; the Vα or Vγ region comprises a CDR-1 and a CDR-2 comprising a CDR-1 and a CDR-2, respectively, contained within the Vα or VY region sequence of SEQ ID NO:66, and the Vβ or Vδ region comprises a CDR-1 and a CDR-2 comprising a CDR-1 and a CDR-2, respectively, contained within the Vβ or Vδ region sequence of SEQ ID NO:58; the Vα or Vγ region comprises a CDR-1 and a CDR-2 comprising a CDR-1 and a CDR-2, respectively, contained within the Vα or Vγ region sequence of SEQ ID NO:79, and the Vβ or Vδ region comprises a CDR-1 and a CDR-2 comprising a CDR-1 and a CDR-2, respectively, contained within the Vβ or Vδ region sequence of SEQ ID NO:85; the Vα or Vγ region comprises a CDR-1 and a CDR-2 comprising a CDR-1 and a CDR-2, respectively, contained within the Vα or Vγ region sequence of SEQ ID NO:93, and the Vβ or Vδ region comprises a CDR-1 and a CDR-2 comprising a CDR-1 and a CDR-2, respectively, contained within the Vβ or Vδ region sequence of SEQ ID NO:99; the Vα or Vγ region comprises a CDR-1 and a CDR-2 comprising a CDR-1 and a CDR-2, respectively, contained within the Vα or Vγ region sequence of SEQ ID NO: 107, and the Vβ or Vδ region comprises a CDR-1 and a CDR-2 comprising a CDR-1 and a CDR-2, respectively, contained within the Vβ or Vδ region sequence of SEQ ID NO: 113; the Vα or Vγ region comprises a CDR-1 and a CDR-2 comprising a CDR-1 and a CDR-2, respectively, contained within the Vα or Vγ region sequence of SEQ ID NO:121, and the Vβ or Vδ region comprises a CDR-1 and a CDR-2 comprising a CDR-1 and a CDR-2, respectively, contained within the Vβ or Vδ region sequence of SEQ ID NO: 127; the Vα or Vγ region comprises a CDR-1 and a CDR-2 comprising a CDR-1 and a CDR-2, respectively, contained within the Vα or Vγ region sequence of SEQ ID NO: 137, and the Vβ or Vδ region comprises a CDR-1 and a CDR-2 comprising a CDR-1 and a CDR-2, respectively, contained within the Vβ or Vδ region sequence of SEQ ID NO: 143; the Vα or Vγ region comprises a CDR-1 and a CDR-2 comprising a CDR-1 and a CDR-2, respectively, contained within the Vα or Vγ region sequence of SEQ ID NO: 153, and the Vβ or Vδ region comprises a CDR-1 and a CDR-2 comprising a CDR-1 and a CDR-2, respectively, contained within the Vβ or Vδ region sequence of SEQ ID NO: 159; the Vα or Vγ region comprises a CDR-1 and a CDR-2 comprising a CDR-1 and a CDR-2, respectively, contained within the Vα or Vγ region sequence of SEQ ID NO: 167, and the Vβ or Vδ region comprises a CDR-1 and a CDR-2 comprising a CDR-1 and a CDR-2, respectively, contained within the Vβ or Vδ region sequence of SEQ ID NO:173; the Vα or Vγ region comprises a CDR-1 and a CDR-2 comprising a CDR-1 and a CDR-2, respectively, contained within the Vα or Vγ region sequence of SEQ ID NO: 181, and the Vβ or Vδ region comprises a CDR-1 and a CDR-2 comprising a CDR-1 and a CDR-2, respectively, contained within the Vβ or Vδ region sequence of SEQ ID NO:187; the Vα or Vγ region comprises a CDR-1 and a CDR-2 comprising a CDR-1 and a CDR-2, respectively, contained within the Vα or Vγ region sequence of SEQ ID NO: 195, and the Vβ or Vδ region comprises a CDR-1 and a CDR-2 comprising a CDR-1 and a CDR-2, respectively, contained within the Vβ or Vδ region sequence of SEQ ID NO:201; the Vα or Vγ region comprises a CDR-1 and a CDR-2 comprising a CDR-1 and a CDR-2, respectively, contained within the Vα or Vγ region sequence of SEQ ID NO:209, and the Vβ or Vo region comprises a CDR-1 and a CDR-2 comprising a CDR-1 and a CDR-2, respectively, contained within the Vβ or Vδ region sequence of SEQ ID NO:215; the Vα or Vγ region comprises a CDR-1 and a CDR-2 comprising a CDR-1 and a CDR-2, respectively, contained within the Vα or Vγ region sequence of SEQ ID NO:225, and the Vβ or Vδ region comprises a CDR-1 and a CDR-2 comprising a CDR-1 and a CDR-2, respectively, contained within the Vβ or Vδ region sequence of SEQ ID NO:231; the Vα or Vγ region comprises a CDR-1 and a CDR-2 comprising a CDR-1 and a CDR-2, respectively, contained within the Vα or Vγ region sequence of SEQ ID NO:239, and the Vβ or Vδ region comprises a CDR-1 and a CDR-2 comprising a CDR-1 and a CDR-2, respectively, contained within the Vβ or Vδ region sequence of SEQ ID NO:245; the Vα or Vγ region comprises a CDR-1 and a CDR-2 comprising a CDR-1 and a CDR-2, respectively, contained within the Vα or Vγ region sequence of SEQ ID NO:253, and the Vβ or Vδ region comprises a CDR-1 and a CDR-2 comprising a CDR-1 and a CDR-2, respectively, contained within the Vβ or Vδ region sequence of SEQ ID NO:259; the Vα or Vγ region comprises a CDR-1 and a CDR-2 comprising a CDR-1 and a CDR-2, respectively, contained within the Vα or Vγ region sequence of SEQ ID NO:269, and the Vβ or Vδ region comprises a CDR-1 and a CDR-2 comprising a CDR-1 and a CDR-2, respectively, contained within the Vβ or Vδ region sequence of SEQ ID NO: 159; the Vα or Vγ region comprises a CDR-1 and a CDR-2 comprising a CDR-1 and a CDR-2, respectively, contained within the Vα or Vγ region sequence of SEQ ID NO:279, and the Vβ or Vδ region comprises a CDR-1 and a CDR-2 comprising a CDR-1 and a CDR-2, respectively, contained within the Vβ or Vδ region sequence of SEQ ID NO:285; the Vα or Vγ region comprises a CDR-1 and a CDR-2 comprising a CDR-1 and a CDR-2, respectively, contained within the Vα or Vγ region sequence of SEQ ID NO:360, and the Vβ or Vo region comprises a CDR-1 and a CDR-2 comprising a CDR-1 and a CDR-2, respectively, contained within the Vβ or Vδ region sequence of SEQ ID NO:364; the Vα or Vγ region comprises a CDR-1 and a CDR-2 comprising a CDR-1 and a CDR-2, respectively, contained within the Vα or Vγ region sequence of SEQ ID NO:370, and the Vβ or Vδ region comprises a CDR-1 and a CDR-2 comprising a CDR-1 and a CDR-2, respectively, contained within the Vβ or Vδ region sequence of SEQ ID NO:374; the Vα or Vγ region comprises a CDR-1 and a CDR-2 comprising a CDR-1 and a CDR-2, respectively, contained within the Vα or VY region sequence of SEQ ID NO:380, and the Vβ or Vδ region comprises a CDR-1 and a CDR-2 comprising a CDR-1 and a CDR-2, respectively, contained within the Vβ or Vδ region sequence of SEQ ID NO:384; the Vα or Vγ region comprises a CDR-1 and a CDR-2 comprising a CDR-1 and a CDR-2, respectively, contained within the Vα or Vγ region sequence of SEQ ID NO:390, and the Vβ or Vδ region comprises a CDR-1 and a CDR-2 comprising a CDR-1 and a CDR-2, respectively, contained within the Vβ or Vδ region sequence of SEQ ID NO:394; the Vα or Vγ region comprises a CDR-1 and a CDR-2 comprising a CDR-1 and a CDR-2, respectively, contained within the Vα or VY region sequence of SEQ ID NO:400, and the Vβ or Vδ region comprises a CDR-1 and a CDR-2 comprising a CDR-1 and a CDR-2, respectively, contained within the Vβ or Vδ region sequence of SEQ ID NO:404; the Vα or Vγ region comprises a CDR-1 and a CDR-2 comprising a CDR-1 and a CDR-2, respectively, contained within the Vα or Vγ region sequence of SEQ ID NO:410, and the Vβ or Vδ region comprises a CDR-1 and a CDR-2 comprising a CDR-1 and a CDR-2, respectively, contained within the Vβ or Vδ region sequence of SEQ ID NO:414; the Vα or Vγ region comprises a CDR-1 and a CDR-2 comprising a CDR-1 and a CDR-2, respectively, contained within the Vα or Vγ region sequence of SEQ ID NO:420, and the Vβ or Vδ region comprises a CDR-1 and a CDR-2 comprising a CDR-1 and a CDR-2, respectively, contained within the Vβ or Vδ region sequence of SEQ ID NO:424; the Vα or Vγ region comprises a CDR-1 and a CDR-2 comprising a CDR-1 and a CDR-2, respectively, contained within the Vα or Vγ region sequence of SEQ ID NO:430, and the Vβ or Vδ region comprises a CDR-1 and a CDR-2 comprising a CDR-1 and a CDR-2, respectively, contained within the Vβ or Vδ region sequence of SEQ ID NO:434; the Vα or Vγ region comprises a CDR-1 and a CDR-2 comprising a CDR-1 and a CDR-2, respectively, contained within the Vα or Vγ region sequence of SEQ ID NO:440, and the Vβ or Vδ region comprises a CDR-1 and a CDR-2 comprising a CDR-1 and a CDR-2, respectively, contained within the Vβ or Vδ region sequence of SEQ ID NO:444; the Vα or Vγ region comprises a CDR-1 and a CDR-2 comprising a CDR-1 and a CDR-2, respectively, contained within the Vα or Vγ region sequence of SEQ ID NO:450, and the Vβ or Vδ region comprises a CDR-1 and a CDR-2 comprising a CDR-1 and a CDR-2, respectively, contained within the Vβ or Vδ region sequence of SEQ ID NO:454; or the Vα or Vγ region comprises a CDR-1 and a CDR-2 comprising a CDR-1 and a CDR-2, respectively, contained within the Vα or Vγ region sequence of SEQ ID NO:481, and the Vβ or Vδ region comprises a CDR-1 and a CDR-2 comprising a CDR-1 and a CDR-2, respectively, contained within the Vβ or Vδ region sequence of SEQ ID NO:485.

[0013] Also provided are TCRs or antigen-binding fragment thereof, comprising: an alpha chain comprising a Vα region and a beta chain comprising a Vβ region; or a gamma chain comprising a Vγ region and a delta chain comprising a Vδ region; wherein: the Vα or Vγ region comprises a CDR-1, a CDR-2, and a CDR-3 comprising a CDR-1, a CDR-2, and a CDR-3, respectively, contained within the Vα or Vγ region sequence of SEQ ID NO:4, and the Vβ or Vδ region comprises a CDR-1, a CDR-2, and a CDR-3 comprising a CDR-1, a CDR-2, and a CDR-3, respectively, contained within the Vβ or Vδ region sequence of SEQ ID NO: 12; the Vα or Vγ region comprises a CDR-1, a CDR-2, and a CDR-3 comprising a CDR-1, a CDR-2, and a CDR-3, respectively, contained within the Vα or VY region sequence of SEQ ID NO:22, and the Vβ or Vδ region comprises a CDR-1, a CDR-2, and a CDR-3 comprising a CDR-1, a CDR-2, and a CDR-3, respectively, contained within the Vβ or Vδ region sequence of SEQ ID NO:28; the Vα or Vγ region comprises a CDR-1, a CDR-2, and a CDR-3 comprising a CDR-1, a CDR-2, and a CDR-3, respectively, contained within the Vα or Vγ region sequence of SEQ ID NO:38, and the Vβ or Vδ region comprises a CDR-1, a CDR-2, and a CDR-3 comprising a CDR-1, a CDR-2, and a CDR-3, respectively, contained within the Vβ or Vδ region sequence of SEQ ID NO:44; the Vα or Vγ region comprises a CDR-1, a CDR-2, and a CDR-3 comprising a CDR-1, a CDR-2, and a CDR-3, respectively, contained within the Vα or Vγ region sequence of SEQ ID NO:52, and the Vβ or Vδ region comprises a CDR-1, a CDR-2, and a CDR-3 comprising a CDR-1, a CDR-2, and a CDR-3, respectively, contained within the Vβ or Vδ region sequence of SEQ ID NO:58; the Vα or Vγ region comprises a CDR-1, a CDR-2, and a CDR-3 comprising a CDR-1, a CDR-2, and a CDR-3, respectively, contained within the Vα or Vγ region sequence of SEQ ID NO:66, and the Vβ or Vδ region comprises a CDR-1, a CDR-2, and a CDR-3 comprising a CDR-1, a CDR-2, and a CDR-3, respectively, contained within the Vβ or Vδ region sequence of SEQ ID NO:58; the Vα or Vγ region comprises a CDR-1, a CDR-2, and a CDR-3 comprising a CDR-1, a CDR-2, and a CDR-3, respectively, contained within the Vα or Vγ region sequence of SEQ ID NO: 79, and the Vβ or Vδ region comprises a CDR-1, a CDR-2, and a CDR-3 comprising a CDR-1, a CDR-2, and a CDR-3, respectively, contained within the Vβ or Vδ region sequence of SEQ ID NO:85; the Vα or Vγ region comprises a CDR-1, a CDR-2, and a CDR-3 comprising a CDR-1, a CDR-2, and a CDR-3, respectively, contained within the Vα or Vγ region sequence of SEQ ID NO:93, and the Vβ or Vo region comprises a CDR-1, a CDR-2, and a CDR-3 comprising a CDR-1, a CDR-2, and a CDR-3, respectively, contained within the Vβ or Vδ region sequence of SEQ ID NO:99; the Vα or Vγ region comprises a CDR-1, a CDR-2, and a CDR-3 comprising a CDR-1, a CDR-2, and a CDR-3, respectively, contained within the Vα or Vγ region sequence of SEQ ID NO: 107, and the Vβ or Vδ region comprises a CDR-1, a CDR-2, and a CDR-3 comprising a CDR-1, a CDR-2, and a CDR-3, respectively, contained within the Vβ or Vδ region sequence of SEQ ID NO:113; the Vα or Vγ region comprises a CDR-1, a CDR-2, and a CDR-3 comprising a CDR-1, a CDR-2, and a CDR-3, respectively, contained within the Vα or Vγ region sequence of SEQ ID NO: 121, and the Vβ or Vδ region comprises a CDR-1, a CDR-2, and a CDR-3 comprising a CDR-1, a CDR-2, and a CDR-3, respectively, contained within the Vβ or Vδ region sequence of SEQ ID NO: 127; the Vα or Vγ region comprises a CDR-1, a CDR-2, and a CDR-3 comprising a CDR-1, a CDR-2, and a CDR-3, respectively, contained within the Vα or Vγ region sequence of SEQ ID NO: 137, and the Vβ or Vδ region comprises a CDR-1, a CDR-2, and a CDR-3 comprising a CDR-1, a CDR-2, and a CDR-3, respectively, contained within the Vβ or Vδ region sequence of SEQ ID NO:143; the Vα or Vγ region comprises a CDR-1, a CDR-2, and a CDR-3 comprising a CDR-1, a CDR-2, and a CDR-3, respectively, contained within the Vα or Vγ region sequence of SEQ ID NO: 153, and the Vβ or Vδ region comprises a CDR-1, a CDR-2, and a CDR-3 comprising a CDR-1, a CDR-2, and a CDR-3, respectively, contained within the Vβ or Vδ region sequence of SEQ ID NO: 159; the Vα or Vγ region comprises a CDR-1, a CDR-2, and a CDR-3 comprising a CDR-1, a CDR-2, and a CDR-3, respectively, contained within the Vα or Vγ region sequence of SEQ ID NO: 167, and the Vβ or Vδ region comprises a CDR-1, a CDR-2, and a CDR-3 comprising a CDR-1, a CDR-2, and a CDR-3, respectively, contained within the Vβ or Vδ region sequence of SEQ ID NO: 173; the Vα or Vγ region comprises a CDR-1, a CDR-2, and a CDR-3 comprising a CDR-1, a CDR-2, and a CDR-3, respectively, contained within the Vα or Vγ region sequence of SEQ ID NO: 181, and the Vβ or Vδ region comprises a CDR-1, a CDR-2, and a CDR-3 comprising a CDR-1, a CDR-2, and a CDR-3, respectively, contained within the Vβ or Vδ region sequence of SEQ ID NO: 187; the Vα or Vγ region comprises a CDR-1, a CDR-2, and a CDR-3 comprising a CDR-1, a CDR-2, and a CDR-3, respectively, contained within the Vα or Vγ region sequence of SEQ ID NO: 195, and the Vβ or Vδ region comprises a CDR-1, a CDR-2, and a CDR-3 comprising a CDR-1, a CDR-2, and a CDR-3, respectively, contained within the Vβ or Vδ region sequence of SEQ ID NO:201; the Vα or Vγ region comprises a CDR-1, a CDR-2, and a CDR-3 comprising a CDR-1, a CDR-2, and a CDR-3, respectively, contained within the Vα or Vγ region sequence of SEQ ID NO:209, and the Vβ or Vδ region comprises a CDR-1, a CDR-2, and a CDR-3 comprising a CDR-1, a CDR-2, and a CDR-3, respectively, contained within the Vβ or Vδ region sequence of SEQ ID NO:215; the Vα or Vγ region comprises a CDR-1, a CDR-2, and a CDR-3 comprising a CDR-1, a CDR-2, and a CDR-3, respectively, contained within the Vα or Vγ region sequence of SEQ ID NO:225, and the Vβ or Vδ region comprises a CDR-1, a CDR-2, and a CDR-3 comprising a CDR-1, a CDR-2, and a CDR-3, respectively, contained within the Vβ or Vδ region sequence of SEQ ID NO:231; the Vα or Vγ region comprises a CDR-1, a CDR-2, and a CDR-3 comprising a CDR-1, a CDR-2, and a CDR-3, respectively, contained within the Vα or Vγ region sequence of SEQ ID NO:239, and the Vβ or Vδ region comprises a CDR-1, a CDR-2, and a CDR-3 comprising a CDR-1, a CDR-2, and a CDR-3, respectively, contained within the Vβ or Vδ region sequence of SEQ ID NO:245; the Vα or Vγ region comprises a CDR-1, a CDR-2, and a CDR-3 comprising a CDR-1, a CDR-2, and a CDR-3, respectively, contained within the Vα or Vγ region sequence of SEQ ID NO:253, and the Vβ or Vδ region comprises a CDR-1, a CDR-2, and a CDR-3 comprising a CDR-1, a CDR-2, and a CDR-3, respectively, contained within the Vβ or Vδ region sequence of SEQ ID NO:259; the Vα or Vγ region comprises a CDR-1, a CDR-2, and a CDR-3 comprising a CDR-1, a CDR-2, and a CDR-3, respectively, contained within the Vα or Vγ region sequence of SEQ ID NO:269, and the Vβ or Vδ region comprises a CDR-1, a CDR-2, and a CDR-3 comprising a CDR-1, a CDR-2, and a CDR-3, respectively, contained within the Vβ or Vδ region sequence of SEQ ID NO: 159; the Vα or Vγ region comprises a CDR-1, a CDR-2, and a CDR-3 comprising a CDR-1, a CDR-2, and a CDR-3, respectively, contained within the Vα or Vγ region sequence of SEQ ID NO:279, and the Vβ or Vδ region comprises a CDR-1, a CDR-2, and a CDR-3 comprising a CDR-1, a CDR-2, and a CDR-3, respectively, contained within the Vβ or Vδ region sequence of SEQ ID NO:285; the Vα or Vγ region comprises a CDR-1, a CDR-2, and a CDR-3 comprising a CDR-1, a CDR-2, and a CDR-3, respectively, contained within the Vα or Vγ region sequence of SEQ ID NO:360, and the Vβ or Vδ region comprises a CDR-1, a CDR-2, and a CDR-3 comprising a CDR-1, a CDR-2, and a CDR-3, respectively, contained within the Vβ or Vδ region sequence of SEQ ID NO:364; the Vα or Vγ region comprises a CDR-1, a CDR-2, and a CDR-3 comprising a CDR-1, a CDR-2, and a CDR-3, respectively, contained within the Vα or Vγ region sequence of SEQ ID NO:370, and the Vβ or Vδ region comprises a CDR-1, a CDR-2, and a CDR-3 comprising a CDR-1, a CDR-2, and a CDR-3, respectively, contained within the Vβ or Vδ region sequence of SEQ ID NO:374; the Vα or Vγ region comprises a CDR-1, a CDR-2, and a CDR-3 comprising a CDR-1, a CDR-2, and a CDR-3, respectively, contained within the Vα or Vγ region sequence of SEQ ID NO:380, and the Vβ or Vo region comprises a CDR-1, a CDR-2, and a CDR-3 comprising a CDR-1, a CDR-2, and a CDR-3, respectively, contained within the Vβ or Vδ region sequence of SEQ ID NO:384; the Vα or Vγ region comprises a CDR-1, a CDR-2, and a CDR-3 comprising a CDR-1, a CDR-2, and a CDR-3, respectively, contained within the Vα or Vγ region sequence of SEQ ID NO:390, and the Vβ or Vδ region comprises a CDR-1, a CDR-2, and a CDR-3 comprising a CDR-1, a CDR-2, and a CDR-3, respectively, contained within the Vβ or Vδ region sequence of SEQ ID NO:394; the Vα or Vγ region comprises a CDR-1, a CDR-2, and a CDR-3 comprising a CDR-1, a CDR-2, and a CDR-3, respectively, contained within the Vα or Vγ region sequence of SEQ ID NO:400, and the Vβ or Vδ region comprises a CDR-1, a CDR-2, and a CDR-3 comprising a CDR-1, a CDR-2, and a CDR-3, respectively, contained within the Vβ or Vδ region sequence of SEQ ID NO:404; the Vα or Vγ region comprises a CDR-1, a CDR-2, and a CDR-3 comprising a CDR-1, a CDR-2, and a CDR-3, respectively, contained within the Vα or Vγ region sequence of SEQ ID NO:410, and the Vβ or Vo region comprises a CDR-1, a CDR-2, and a CDR-3 comprising a CDR-1, a CDR-2, and a CDR-3, respectively, contained within the Vβ or Vδ region sequence of SEQ ID NO:414; the Vα or Vγ region comprises a CDR-1, a CDR-2, and a CDR-3 comprising a CDR-1, a CDR-2, and a CDR-3, respectively, contained within the Vα or Vγ region sequence of SEQ ID NO:420, and the Vβ or Vδ region comprises a CDR-1, a CDR-2, and a CDR-3 comprising a CDR-1, a CDR-2, and a CDR-3, respectively, contained within the Vβ or Vδ region sequence of SEQ ID NO:424; the Vα or Vγ region comprises a CDR-1, a CDR-2, and a CDR-3 comprising a CDR-1, a CDR-2, and a CDR-3, respectively, contained within the Vα or Vγ region sequence of SEQ ID NO:430, and the Vβ or Vδ region comprises a CDR-1, a CDR-2, and a CDR-3 comprising a CDR-1, a CDR-2, and a CDR-3, respectively, contained within the Vβ or Vδ region sequence of SEQ ID NO:434; the Vα or Vγ region comprises a CDR-1, a CDR-2, and a CDR-3 comprising a CDR-1, a CDR-2, and a CDR-3, respectively, contained within the Vα or Vγ region sequence of SEQ ID NO:440, and the Vβ or Vδ region comprises a CDR-1, a CDR-2, and a CDR-3 comprising a CDR-1, a CDR-2, and a CDR-3, respectively, contained within the Vβ or Vδ region sequence of SEQ ID NO:444; the Vα or Vγ region comprises a CDR-1, a CDR-2, and a CDR-3 comprising a CDR-1, a CDR-2, and a CDR-3, respectively, contained within the Vα or Vγ region sequence of SEQ ID NO:450, and the Vβ or Vδ region comprises a CDR-1, a CDR-2, and a CDR-3 comprising a CDR-1, a CDR-2, and a CDR-3, respectively, contained within the Vβ or Vδ region sequence of SEQ ID NO:454; or the Vα or Vγ region comprises a CDR-1, a CDR-2, and a CDR-3 comprising a CDR-1, a CDR-2, and a CDR-3, respectively, contained within the Vα or Vγ region sequence of SEQ ID NO:481, and the Vβ or Vδ region comprises a CDR-1, a CDR-2, and a CDR-3 comprising a CDR-1, a CDR-2, and a CDR-3, respectively, contained within the Vβ or Vδ region sequence of SEQ ID NO:485.

[0014] Also provided are TCRs or antigen-binding fragment thereof, comprising: an alpha chain comprising a Vα region and a beta chain comprising a Vβ region; or a gamma chain comprising a Vγ region and a delta chain comprising a Vδ region; wherein: the Vα or Vγ region comprises SEQ ID NO:4 or a sequence that has at least 90% sequence identity thereto, and the Vβ or Vδ region comprises SEQ ID NO:12 or a sequence that has at least 90% sequence identity thereto; the Vα or Vγ region comprises SEQ ID NO:22 or a sequence that has at least 90% sequence identity thereto, and the Vβ or Vδ region comprises SEQ ID NO:28 or a sequence that has at least 90% sequence identity thereto; the Vα or Vγ region comprises SEQ ID NO:38 or a sequence that has at least 90% sequence identity thereto, and the Vβ or Vδ region comprises SEQ ID NO:44 or a sequence that has at least 90% sequence identity thereto; the Vα or Vγ region comprises SEQ ID NO:52 or a sequence that has at least 90% sequence identity thereto, and the Vβ or Vδ region comprises SEQ ID NO:58 or a sequence that has at least 90% sequence identity thereto; the Vα or Vγ region comprises SEQ ID NO:66 or a sequence that has at least 90% sequence identity thereto, and the Vβ or Vδ region comprises SEQ ID NO:58 or a sequence that has at least 90% sequence identity thereto; the Vα or Vγ region comprises SEQ ID NO: 79 or a sequence that has at least 90% sequence identity thereto, and the Vβ or Vδ region comprises SEQ ID NO:85 or a sequence that has at least 90% sequence identity thereto; the Vα or Vγ region comprises SEQ ID NO:93 or a sequence that has at least 90% sequence identity thereto, and the Vβ or Vδ region comprises SEQ ID NO:99 or a sequence that has at least 90% sequence identity thereto; the Vα or Vγ region comprises SEQ ID NO: 107 or a sequence that has at least 90% sequence identity thereto, and the Vβ or Vδ region comprises SEQ ID NO:113 or a sequence that has at least 90% sequence identity thereto; the Vα or Vγ region comprises SEQ ID NO:121 or a sequence that has at least 90% sequence identity thereto, and the Vβ or Vδ region comprises SEQ ID NO: 127 or a sequence that has at least 90% sequence identity thereto; the Vα or Vγ region comprises SEQ ID NO:137 or a sequence that has at least 90% sequence identity thereto, and the Vβ or Vδ region comprises SEQ ID NO: 143 or a sequence that has at least 90% sequence identity thereto; the Vα or Vγ region comprises SEQ ID NO: 153 or a sequence that has at least 90% sequence identity thereto, and the Vβ or Vδ region comprises SEQ ID NO:159 or a sequence that has at least 90% sequence identity thereto; the Vα or Vγ region comprises SEQ ID NO: 167 or a sequence that has at least 90% sequence identity thereto, and the Vβ or Vδ region comprises SEQ ID NO: 173 or a sequence that has at least 90% sequence identity thereto; the Vα or Vγ region comprises SEQ ID NO: 181 or a sequence that has at least 90% sequence identity thereto, and the Vβ or Vδ region comprises SEQ ID NO:187 or a sequence that has at least 90% sequence identity thereto; the Vα or Vγ region comprises SEQ ID NO:195 or a sequence that has at least 90% sequence identity thereto, and the Vβ or Vδ region comprises SEQ ID NO:201 or a sequence that has at least 90% sequence identity thereto; the Vα or Vγ region comprises SEQ ID NO:209 or a sequence that has at least 90% sequence identity thereto, and the Vβ or Vδ region comprises SEQ ID NO:215 or a sequence that has at least 90% sequence identity thereto; the Vα or Vγ region comprises SEQ ID NO:225 or a sequence that has at least 90% sequence identity thereto, and the Vβ or Vδ region comprises SEQ ID NO:231 or a sequence that has at least 90% sequence identity thereto; the Vα or Vγ region comprises SEQ ID NO:239 or a sequence that has at least 90% sequence identity thereto, and the Vβ or Vδ region comprises SEQ ID NO:245 or a sequence that has at least 90% sequence identity thereto; the Vα or Vγ region comprises SEQ ID NO:253 or a sequence that has at least 90% sequence identity thereto, and the Vβ or Vδ region comprises SEQ ID NO:259 or a sequence that has at least 90% sequence identity thereto; the Vα or Vγ region comprises SEQ ID NO:269 or a sequence that has at least 90% sequence identity thereto, and the Vβ or Vδ region comprises SEQ ID NO: 159 or a sequence that has at least 90% sequence identity thereto; the Vα or Vγ region comprises SEQ ID NO:279 or a sequence that has at least 90% sequence identity thereto, and the Vβ or Vδ region comprises SEQ ID NO:285 or a sequence that has at least 90% sequence identity thereto; the Vα or Vγ region comprises SEQ ID NO:360 or a sequence that has at least 90% sequence identity thereto, and the Vβ or Vδ region comprises SEQ ID NO:364 or a sequence that has at least 90% sequence identity thereto; the Vα or Vγ region comprises SEQ ID NO:370 or a sequence that has at least 90% sequence identity thereto, and the Vβ or Vδ region comprises SEQ ID NO:374 or a sequence that has at least 90% sequence identity thereto; the Vα or Vγ region comprises SEQ ID NO:380 or a sequence that has at least 90% sequence identity thereto, and the Vβ or Vδ region comprises SEQ ID NO:384 or a sequence that has at least 90% sequence identity thereto; the Vα or Vγ region comprises SEQ ID NO:390 or a sequence that has at least 90% sequence identity thereto, and the Vβ or Vδ region comprises SEQ ID NO:394 or a sequence that has at least 90% sequence identity thereto; the Vα or Vγ region comprises SEQ ID NO:400 or a sequence that has at least 90% sequence identity thereto, and the Vβ or Vδ region comprises SEQ ID NO:404 or a sequence that has at least 90% sequence identity thereto; the Vα or Vγ region comprises SEQ ID NO:410 or a sequence that has at least 90% sequence identity thereto, and the Vβ or Vδ region comprises SEQ ID NO:414 or a sequence that has at least 90% sequence identity thereto; the Vα or Vγ region comprises SEQ ID NO:420 or a sequence that has at least 90% sequence identity thereto, and the Vβ or Vδ region comprises SEQ ID NO:424 or a sequence that has at least 90% sequence identity thereto; the Vα or Vγ region comprises SEQ ID NO:430 or a sequence that has at least 90% sequence identity thereto, and the Vβ or Vδ region comprises SEQ ID NO:434 or a sequence that has at least 90% sequence identity thereto; the Vα or Vγ region comprises SEQ ID NO:440 or a sequence that has at least 90% sequence identity thereto, and the Vβ or Vδ region comprises SEQ ID NO:444 or a sequence that has at least 90% sequence identity thereto; the Vα or Vγ region comprises SEQ ID NO: 450 or a sequence that has at least 90% sequence identity thereto, and the Vβ or Vδ region comprises SEQ ID NO:454 or a sequence that has at least 90% sequence identity thereto; or the Vα or Vγ region comprises SEQ ID NO: 481 or a sequence that has at least 90% sequence identity thereto, and the Vβ or Vδ region comprises SEQ ID NO:485 or a sequence that has at least 90% sequence identity thereto.

[0015] In some of any of the embodiments provided herein, the Vα or Vγ region comprises SEQ ID NO:4, and the Vβ or Vδ region comprises SEQ ID NO: 12; the Vα or Vγ region comprises SEQ ID NO:22, and the Vβ or Vδ region comprises SEQ ID NO:28; the Vα or Vγ region comprises SEQ ID NO:38, and the Vβ or Vδ region comprises SEQ ID NO:44; the Vα or Vγ region comprises SEQ ID NO:52, and the Vβ or Vδ region comprises SEQ ID NO:58; the Vα or Vγ region comprises SEQ ID NO:66, and the Vβ or Vδ region comprises SEQ ID NO:58; the Vα or Vγ region comprises SEQ ID NO:79, and the Vβ or Vδ region comprises SEQ ID NO:85; the Vα or Vγ region comprises SEQ ID NO:93, and the Vβ or Vδ region comprises SEQ ID NO:99; the Vα or Vγ region comprises SEQ ID NO: 107, and the Vβ or Vδ region comprises SEQ ID NO:113; the Vα or Vγ region comprises SEQ ID NO: 121, and the Vβ or Vδ region comprises SEQ ID NO: 127; the Vα or Vγ region comprises SEQ ID NO: 137, and the Vβ or Vδ region comprises SEQ ID NO: 143; the Vα or Vγ region comprises SEQ ID NO: 153, and the Vβ or Vδ region comprises SEQ ID NO: 159; the Vα or Vγ region comprises SEQ ID NO:167, and the Vβ or Vδ region comprises SEQ ID NO: 173; the Vα or Vγ region comprises SEQ ID NO: 181, and the Vβ or Vδ region comprises SEQ ID NO: 187; the Vα or Vγ region comprises SEQ ID NO: 195, and the Vβ or Vδ region comprises SEQ ID NO:201; the Vα or Vγ region comprises SEQ ID NO:209, and the Vβ or Vδ region comprises SEQ ID NO:215; the Vα or Vγ region comprises SEQ ID NO:225, and the Vβ or Vδ region comprises SEQ ID NO:231; the Vα or Vγ region comprises SEQ ID NO:239, and the Vβ or Vδ region comprises SEQ ID NO:245; the Vα or Vγ region comprises SEQ ID NO:253, and the Vβ or Vδ region comprises SEQ ID NO:259; the Vα or Vγ region comprises SEQ ID NO:269, and the Vβ or Vo region comprises SEQ ID NO: 159; the Vα or Vγ region comprises SEQ ID NO:279, and the Vβ or Vδ region comprises SEQ ID NO:285; the Vα or Vγ region comprises SEQ ID NO:360, and the Vβ or Vδ region comprises SEQ ID NO:364; the Vα or Vγ region comprises SEQ ID NO:370, and the Vβ or Vδ region comprises SEQ ID NO:374; the Vα or Vγ region comprises SEQ ID NO:380, and the Vβ or Vδ region comprises SEQ ID NO:384; the Vα or Vγ region comprises SEQ ID NO:390, and the Vβ or Vδ region comprises SEQ ID NO:394; the Vα or Vγ region comprises SEQ ID NO:400, and the Vβ or Vδ region comprises SEQ ID NO:404; the Vα or Vγ region comprises SEQ ID NO:410, and the Vβ or Vδ region comprises SEQ ID NO:414; the Vα or Vγ region comprises SEQ ID NO:420, and the Vβ or Vδ region comprises SEQ ID NO:424; the Vα or Vγ region comprises SEQ ID NO:430, and the Vβ or Vδ region comprises SEQ ID NO:434; the Vα or Vγ region comprises SEQ ID NO:440, and the Vβ or Vδ region comprises SEQ ID NO:444; the Vα or Vγ region comprises SEQ ID NO:450, and the Vβ or Vδ region comprises SEQ ID NO:454; or the Vα or Vγ region comprises SEQ ID NO:481, and the Vβ or Vδ region comprises SEQ ID NO:485.

[0016] In some of any of the embodiments provided herein, the alpha chain further comprises an alpha constant (Cα) region and the beta chain further comprises a beta constant (Cβ) region; or the gamma chain further comprises an gamma constant (Cδ) region and the delta chain further comprises a delta constant (Cδ) region. In some of any of the embodiments provided herein, the Cα comprises SEQ ID NO: 294 or 296, and the Cβ comprises SEQ ID NO: 297 or 299.

[0017] In some of any of the embodiments provided herein, the alpha or gamma chain comprises SEQ ID NO:6, and the beta or delta chain comprises SEQ ID NO:14; the alpha or gamma chain comprises SEQ ID NO:24, and the beta or delta chain comprises SEQ ID NO:30; the alpha or gamma chain comprises SEQ ID NO:40, and the beta or delta chain comprises SEQ ID NO:46; the alpha or gamma chain comprises SEQ ID NO:54, and the beta or delta chain comprises SEQ ID NO:60; the alpha or gamma chain comprises SEQ ID NO:68, and the beta or delta chain comprises SEQ ID NO:71; the alpha or gamma chain comprises SEQ ID NO:81, and the beta or delta chain comprises SEQ ID NO:87; the alpha or gamma chain comprises SEQ ID NO:95, and the beta or delta chain comprises SEQ ID NO: 101; the alpha or gamma chain comprises SEQ ID NO: 109, and the beta or delta chain comprises SEQ ID NO:115; the alpha or gamma chain comprises SEQ ID NO:123, and the beta or delta chain comprises SEQ ID NO:129; the alpha or gamma chain comprises SEQ ID NO:139, and the beta or delta chain comprises SEQ ID NO: 145; the alpha or gamma chain comprises SEQ ID NO:155, and the beta or delta chain comprises SEQ ID NO:161; the alpha or gamma chain comprises SEQ ID NO: 169, and the beta or delta chain comprises SEQ ID NO:175; the alpha or gamma chain comprises SEQ ID NO: 183, and the beta or delta chain comprises SEQ ID NO: 189; the alpha or gamma chain comprises SEQ ID NO:197, and the beta or delta chain comprises SEQ ID NO:203; the alpha or gamma chain comprises SEQ ID NO:211, and the beta or delta chain comprises SEQ ID NO:217; the alpha or gamma chain comprises SEQ ID NO:227, and the beta or delta chain comprises SEQ ID NO:233; the alpha or gamma chain comprises SEQ ID NO:241, and the beta or delta chain comprises SEQ ID NO:247; the alpha or gamma chain comprises SEQ ID NO:255, and the beta or delta chain comprises SEQ ID NO:261; the alpha or gamma chain comprises SEQ ID NO:271, and the beta or delta chain comprises SEQ ID NO: 161; the alpha or gamma chain comprises SEQ ID NO:281, and the beta or delta chain comprises SEQ ID NO:287; the alpha or gamma chain comprises SEQ ID NO:362, and the beta or delta chain comprises SEQ ID NO:366; the alpha or gamma chain comprises SEQ ID NO:372, and the beta or delta chain comprises SEQ ID NO:376; the alpha or gamma chain comprises SEQ ID NO:382, and the beta or delta chain comprises SEQ ID NO:386; the alpha or gamma chain comprises SEQ ID NO:392, and the beta or delta chain comprises SEQ ID NO:396; the alpha or gamma chain comprises SEQ ID NO:402, and the beta or delta chain comprises SEQ ID NO:406; the alpha or gamma chain comprises SEQ ID NO:412, and the beta or delta chain comprises SEQ ID NO:416; the alpha or gamma chain comprises SEQ ID NO:422, and the beta or delta chain comprises SEQ ID NO:426; the alpha or gamma chain comprises SEQ ID NO:432, and the beta or delta chain comprises SEQ ID NO:436; the alpha or gamma chain comprises SEQ ID NO:442, and the beta or delta chain comprises SEQ ID NO:446; the alpha or gamma chain comprises SEQ ID NO:452, and the beta or delta chain comprises SEQ ID NO:456; or the alpha or gamma chain comprises SEQ ID NO:483, and the beta or delta chain comprises SEQ ID NO:487.

[0018] In some of any of the embodiments provided herein, the TCR or antigen-binding fragment thereof recognizes a peptide epitope of a minor histocompatibility antigen HA-1 in the context of an MHC molecule. In some of any of the embodiments provided herein, the MHC molecule is a human leukocyte antigens (HLA)-A molecule. In some of any of the embodiments provided herein, the HLA-A molecule is of serotype HLA-A*02:01. In some of any of the embodiments provided herein, the HLA-A molecule is of serotype HLA-A*02:06. In some of any of the embodiments provided herein, the peptide epitope of HA-1 is set forth in SEQ ID NO:354.

[0019] Also provided are polynucleotides encoding any of the TCRs or antigen-binding fragment thereof provided herein, or an alpha chain, a beta chain, a gamma chain, or a delta chain thereof.

[0020] In some of any of the embodiments provided herein, the polynucleotide comprises a nucleotide sequence encoding the Vα region and a nucleotide sequence encoding the Vβ region; or a nucleotide sequence encoding the Vγ region and a nucleotide sequence encoding the Vδ region; wherein: the nucleotide sequence encoding the Vα or Vγ region comprises SEQ ID NO:7 or a sequence that has at least 90% sequence identity thereto, and the nucleotide sequence encoding the Vβ or Vδ region comprises SEQ ID NO:15 or a sequence that has at least 90% sequence identity thereto; the nucleotide sequence encoding the Vα or Vγ region comprises SEQ ID NO:25 or a sequence that has at least 90% sequence identity thereto, and the nucleotide sequence encoding the Vβ or Vδ region comprises SEQ ID NO:31 or a sequence that has at least 90% sequence identity thereto; the nucleotide sequence encoding the Vα or Vγ region comprises SEQ ID NO:41 or a sequence that has at least 90% sequence identity thereto, and the nucleotide sequence encoding the Vβ or Vδ region comprises SEQ ID NO:47 or a sequence that has at least 90% sequence identity thereto; the nucleotide sequence encoding the Vα or Vγ region comprises SEQ ID NO:55 or a sequence that has at least 90% sequence identity thereto, and the nucleotide sequence encoding the Vβ or Vδ region comprises SEQ ID NO:61 or a sequence that has at least 90% sequence identity thereto; the nucleotide sequence encoding the Vα or Vγ region comprises SEQ ID NO:69 or a sequence that has at least 90% sequence identity thereto, and the nucleotide sequence encoding the Vβ or Vδ region comprises SEQ ID NO:72 or a sequence that has at least 90% sequence identity thereto; the nucleotide sequence encoding the Vα or Vγ region comprises SEQ ID NO:82 or a sequence that has at least 90% sequence identity thereto, and the nucleotide sequence encoding the Vβ or Vδ region comprises SEQ ID NO:88 or a sequence that has at least 90% sequence identity thereto; the nucleotide sequence encoding the Vα or Vγ region comprises SEQ ID NO:96 or a sequence that has at least 90% sequence identity thereto, and the nucleotide sequence encoding the Vβ or Vδ region comprises SEQ ID NO: 102 or a sequence that has at least 90% sequence identity thereto; the nucleotide sequence encoding the Vα or Vγ region comprises SEQ ID NO: 110 or a sequence that has at least 90% sequence identity thereto, and the nucleotide sequence encoding the Vβ or Vδ region comprises SEQ ID NO:116 or a sequence that has at least 90% sequence identity thereto; the nucleotide sequence encoding the Vα or Vγ region comprises SEQ ID NO: 124 or a sequence that has at least 90% sequence identity thereto, and the nucleotide sequence encoding the Vβ or Vδ region comprises SEQ ID NO:130 or a sequence that has at least 90% sequence identity thereto; the nucleotide sequence encoding the Vα or Vγ region comprises SEQ ID NO:140 or a sequence that has at least 90% sequence identity thereto, and the nucleotide sequence encoding the Vβ or Vδ region comprises SEQ ID NO: 146 or a sequence that has at least 90% sequence identity thereto; the nucleotide sequence encoding the Vα or Vγ region comprises SEQ ID NO:156 or a sequence that has at least 90% sequence identity thereto, and the nucleotide sequence encoding the Vβ or Vδ region comprises SEQ ID NO:162 or a sequence that has at least 90% sequence identity thereto; the nucleotide sequence encoding the Vα or Vγ region comprises SEQ ID NO:170 or a sequence that has at least 90% sequence identity thereto, and the nucleotide sequence encoding the Vβ or Vδ region comprises SEQ ID NO:176 or a sequence that has at least 90% sequence identity thereto; the nucleotide sequence encoding the Vα or Vγ region comprises SEQ ID NO:184 or a sequence that has at least 90% sequence identity thereto, and the nucleotide sequence encoding the Vβ or Vδ region comprises SEQ ID NO:190 or a sequence that has at least 90% sequence identity thereto; the nucleotide sequence encoding the Vα or Vγ region comprises SEQ ID NO: 198 or a sequence that has at least 90% sequence identity thereto, and the nucleotide sequence encoding the Vβ or Vδ region comprises SEQ ID NO:204 or a sequence that has at least 90% sequence identity thereto; the nucleotide sequence encoding the Vα or Vγ region comprises SEQ ID NO:212 or a sequence that has at least 90% sequence identity thereto, and the nucleotide sequence encoding the Vβ or Vδ region comprises SEQ ID NO:218 or a sequence that has at least 90% sequence identity thereto; the nucleotide sequence encoding the Vα or Vγ region comprises SEQ ID NO:228 or a sequence that has at least 90% sequence identity thereto, and the nucleotide sequence encoding the Vβ or Vδ region comprises SEQ ID NO:234 or a sequence that has at least 90% sequence identity thereto; the nucleotide sequence encoding the Vα or Vγ region comprises SEQ ID NO:242 or a sequence that has at least 90% sequence identity thereto, and the nucleotide sequence encoding the Vβ or Vδ region comprises SEQ ID NO:248 or a sequence that has at least 90% sequence identity thereto; the nucleotide sequence encoding the Vα or Vγ region comprises SEQ ID NO:256 or a sequence that has at least 90% sequence identity thereto, and the nucleotide sequence encoding the Vβ or Vδ region comprises SEQ ID NO:262 or a sequence that has at least 90% sequence identity thereto; the nucleotide sequence encoding the Vα or Vγ region comprises SEQ ID NO:272 or a sequence that has at least 90% sequence identity thereto, and the nucleotide sequence encoding the Vβ or Vδ region comprises SEQ ID NO:274 or a sequence that has at least 90% sequence identity thereto; or the nucleotide sequence encoding the Vα or Vγ region comprises SEQ ID NO:282 or a sequence that has at least 90% sequence identity thereto, and the nucleotide sequence encoding the Vβ or Vδ region comprises SEQ ID NO:288 or a sequence that has at least 90% sequence identity thereto.

[0021] In some of any of the embodiments provided herein, the nucleotide sequence encoding the alpha or gamma chain comprises SEQ ID NO:8, and the nucleotide sequence encoding the beta or delta chain comprises SEQ ID NO:16; the nucleotide sequence encoding the alpha or gamma chain comprises SEQ ID NO:26, and the nucleotide sequence encoding the beta or delta chain comprises SEQ ID NO:32; the nucleotide sequence encoding the alpha or gamma chain comprises SEQ ID NO:42, and the nucleotide sequence encoding the beta or delta chain comprises SEQ ID NO:48; the nucleotide sequence encoding the alpha or gamma chain comprises SEQ ID NO:56, and the nucleotide sequence encoding the beta or delta chain comprises SEQ ID NO:62; the nucleotide sequence encoding the alpha or gamma chain comprises SEQ ID NO:70, and the nucleotide sequence encoding the beta or delta chain comprises SEQ ID NO:73; the nucleotide sequence encoding the alpha or gamma chain comprises SEQ ID NO:83, and the nucleotide sequence encoding the beta or delta chain comprises SEQ ID NO:89; the nucleotide sequence encoding the alpha or gamma chain comprises SEQ ID NO:97, and the nucleotide sequence encoding the beta or delta chain comprises SEQ ID NO:103; the nucleotide sequence encoding the alpha or gamma chain comprises SEQ ID NO:111, and the nucleotide sequence encoding the beta or delta chain comprises SEQ ID NO:117; the nucleotide sequence encoding the alpha or gamma chain comprises SEQ ID NO: 125, and the nucleotide sequence encoding the beta or delta chain comprises SEQ ID NO:131; the nucleotide sequence encoding the alpha or gamma chain comprises SEQ ID NO:141, and the nucleotide sequence encoding the beta or delta chain comprises SEQ ID NO:147; the nucleotide sequence encoding the alpha or gamma chain comprises SEQ ID NO:157, and the nucleotide sequence encoding the beta or delta chain comprises SEQ ID NO:163; the nucleotide sequence encoding the alpha or gamma chain comprises SEQ ID NO: 171, and the nucleotide sequence encoding the beta or delta chain comprises SEQ ID NO:177; the nucleotide sequence encoding the alpha or gamma chain comprises SEQ ID NO: 185, and the nucleotide sequence encoding the beta or delta chain comprises SEQ ID NO:191; the nucleotide sequence encoding the alpha or gamma chain comprises SEQ ID NO:199, and the nucleotide sequence encoding the beta or delta chain comprises SEQ ID NO:205; the nucleotide sequence encoding the alpha or gamma chain comprises SEQ ID NO:213, and the nucleotide sequence encoding the beta or delta chain comprises SEQ ID NO:219; the nucleotide sequence encoding the alpha or gamma chain comprises SEQ ID NO:229, and the nucleotide sequence encoding the beta or delta chain comprises SEQ ID NO:235; the nucleotide sequence encoding the alpha or gamma chain comprises SEQ ID NO:243, and the nucleotide sequence encoding the beta or delta chain comprises SEQ ID NO:249; the nucleotide sequence encoding the alpha or gamma chain comprises SEQ ID NO:257, and the nucleotide sequence encoding the beta or delta chain comprises SEQ ID NO:263; the nucleotide sequence encoding the alpha or gamma chain comprises SEQ ID NO:273, and the nucleotide sequence encoding the beta or delta chain comprises SEQ ID NO:275; or the nucleotide sequence encoding the alpha or gamma chain comprises SEQ ID NO:283, and the nucleotide sequence encoding the beta or delta chain comprises SEQ ID NO:289. In some embodiments, the nucleotide sequences encoding the alpha or gamma chain and the nucleotide sequence encoding the beta or delta chain comprise sequences present in SEQ ID NO: 368, 378, 388, 398, 408, 418, 428, 438, 448, 458, or 489. Nucleotides of SEQ ID NO: 368, 378, 388, 398, 408, 418, 428, 438, 448, 458, and 489 encoding the alpha chains, P2A sequences, and beta chains are indicated in the sequence Table 4.

[0022] In some of any of the embodiments provided herein, the nucleotide sequence encoding the Vα or Vγ region comprises SEQ ID NO:301, and the nucleotide sequence encoding the Vβ or Vδ region comprises SEQ ID NO:321; the nucleotide sequence encoding the Vα or Vγ region comprises SEQ ID NO:302, and the nucleotide sequence encoding the Vβ or Vδ region comprises SEQ ID NO:322; the nucleotide sequence encoding the Vα or Vγ region comprises SEQ ID NO:303, and the nucleotide sequence encoding the Vβ or Vδ region comprises SEQ ID NO:323; the nucleotide sequence encoding the Vα or Vγ region comprises SEQ ID NO:304, and the nucleotide sequence encoding the Vβ or Vδ region comprises SEQ ID NO:324; the nucleotide sequence encoding the Vα or Vγ region comprises SEQ ID NO:305, and the nucleotide sequence encoding the Vβ or Vδ region comprises SEQ ID NO:325; the nucleotide sequence encoding the Vα or Vγ region comprises SEQ ID NO:306, and the nucleotide sequence encoding the Vβ or Vδ region comprises SEQ ID NO:326; the nucleotide sequence encoding the Vα or Vγ region comprises SEQ ID NO:307, and the nucleotide sequence encoding the Vβ or Vδ region comprises SEQ ID NO:327; the nucleotide sequence encoding the Vα or Vγ region comprises SEQ ID NO:308, and the nucleotide sequence encoding the Vβ or Vδ region comprises SEQ ID NO:328; the nucleotide sequence encoding the Vα or Vγ region comprises SEQ ID NO:309, and the nucleotide sequence encoding the Vβ or Vδ region comprises SEQ ID NO:329; the nucleotide sequence encoding the Vα or Vγ region comprises SEQ ID NO:310, and the nucleotide sequence encoding the Vβ or Vδ region comprises SEQ ID NO:330; the nucleotide sequence encoding the Vα or Vγ region comprises SEQ ID NO:311, and the nucleotide sequence encoding the Vβ or Vδ region comprises SEQ ID NO:331; the nucleotide sequence encoding the Vα or Vγ region comprises SEQ ID NO:312, and the nucleotide sequence encoding the Vβ or Vδ region comprises SEQ ID NO:332; the nucleotide sequence encoding the Vα or Vγ region comprises SEQ ID NO:313, and the nucleotide sequence encoding the Vβ or Vδ region comprises SEQ ID NO:333; the nucleotide sequence encoding the Vα or Vγ region comprises SEQ ID NO:314, and the nucleotide sequence encoding the Vβ or Vδ region comprises SEQ ID NO:334; the nucleotide sequence encoding the Vα or Vγ region comprises SEQ ID NO:315, and the nucleotide sequence encoding the Vβ or Vδ region comprises SEQ ID NO:335; the nucleotide sequence encoding the Vα or Vγ region comprises SEQ ID NO:316, and the nucleotide sequence encoding the Vβ or Vδ region comprises SEQ ID NO:336; the nucleotide sequence encoding the Vα or Vγ region comprises SEQ ID NO:317, and the nucleotide sequence encoding the Vβ or Vδ region comprises SEQ ID NO:337; the nucleotide sequence encoding the Vα or Vγ region comprises SEQ ID NO:318, and the nucleotide sequence encoding the Vβ or Vδ region comprises SEQ ID NO:338; the nucleotide sequence encoding the Vα or Vγ region comprises SEQ ID NO:319, and the nucleotide sequence encoding the Vβ or Vδ region comprises SEQ ID NO:339; or the nucleotide sequence encoding the Vα or Vγ region comprises SEQ ID NO:320, and the nucleotide sequence encoding the Vβ or Vδ region comprises SEQ ID NO:340. In some of any of the embodiments provided herein, the polynucleotide comprises a nucleotide sequence encoding an alpha chain and a nucleotide sequence encoding a beta chain; or a nucleotide sequence encoding a gamma chain and a nucleotide sequence encoding a delta chain; wherein: the nucleotide sequence encoding the alpha or gamma chain comprises SEQ ID NO:8 or a sequence that has at least 90% sequence identity thereto, and the nucleotide sequence encoding the beta or delta chain comprises SEQ ID NO:16 or a sequence that has at least 90% sequence identity thereto; the nucleotide sequence encoding the alpha or gamma chain comprises SEQ ID NO:26 or a sequence that has at least 90% sequence identity thereto, and the nucleotide sequence encoding the beta or delta chain comprises SEQ ID NO:32 or a sequence that has at least 90% sequence identity thereto; the nucleotide sequence encoding the alpha or gamma chain comprises SEQ ID NO:42 or a sequence that has at least 90% sequence identity thereto, and the nucleotide sequence encoding the beta or delta chain comprises SEQ ID NO:48 or a sequence that has at least 90% sequence identity thereto; the nucleotide sequence encoding the alpha or gamma chain comprises SEQ ID NO:56 or a sequence that has at least 90% sequence identity thereto, and the nucleotide sequence encoding the beta or delta chain comprises SEQ ID NO:62 or a sequence that has at least 90% sequence identity thereto; the nucleotide sequence encoding the alpha or gamma chain comprises SEQ ID NO:70 or a sequence that has at least 90% sequence identity thereto, and the nucleotide sequence encoding the beta or delta chain comprises SEQ ID NO:73 or a sequence that has at least 90% sequence identity thereto; the nucleotide sequence encoding the alpha or gamma chain comprises SEQ ID NO:83 or a sequence that has at least 90% sequence identity thereto, and the nucleotide sequence encoding the beta or delta chain comprises SEQ ID NO:89 or a sequence that has at least 90% sequence identity thereto; the nucleotide sequence encoding the alpha or gamma chain comprises SEQ ID NO:97 or a sequence that has at least 90% sequence identity thereto, and the nucleotide sequence encoding the beta or delta chain comprises SEQ ID NO: 103 or a sequence that has at least 90% sequence identity thereto; the nucleotide sequence encoding the alpha or gamma chain comprises SEQ ID NO: 111 or a sequence that has at least 90% sequence identity thereto, and the nucleotide sequence encoding the beta or delta chain comprises SEQ ID NO:117 or a sequence that has at least 90% sequence identity thereto; the nucleotide sequence encoding the alpha or gamma chain comprises SEQ ID NO:125 or a sequence that has at least 90% sequence identity thereto, and the nucleotide sequence encoding the beta or delta chain comprises SEQ ID NO: 131 or a sequence that has at least 90% sequence identity thereto; the nucleotide sequence encoding the alpha or gamma chain comprises SEQ ID NO:141 or a sequence that has at least 90% sequence identity thereto, and the nucleotide sequence encoding the beta or delta chain comprises SEQ ID NO: 147 or a sequence that has at least 90% sequence identity thereto; the nucleotide sequence encoding the alpha or gamma chain comprises SEQ ID NO: 157 or a sequence that has at least 90% sequence identity thereto, and the nucleotide sequence encoding the beta or delta chain comprises SEQ ID NO: 163 or a sequence that has at least 90% sequence identity thereto; the nucleotide sequence encoding the alpha or gamma chain comprises SEQ ID NO:171 or a sequence that has at least 90% sequence identity thereto, and the nucleotide sequence encoding the beta or delta chain comprises SEQ ID NO: 177 or a sequence that has at least 90% sequence identity thereto; the nucleotide sequence encoding the alpha or gamma chain comprises SEQ ID NO:185 or a sequence that has at least 90% sequence identity thereto, and the nucleotide sequence encoding the beta or delta chain comprises SEQ ID NO: 191 or a sequence that has at least 90% sequence identity thereto; the nucleotide sequence encoding the alpha or gamma chain comprises SEQ ID NO: 199 or a sequence that has at least 90% sequence identity thereto, and the nucleotide sequence encoding the beta or delta chain comprises SEQ ID NO:205 or a sequence that has at least 90% sequence identity thereto; the nucleotide sequence encoding the alpha or gamma chain comprises SEQ ID NO:213 or a sequence that has at least 90% sequence identity thereto, and the nucleotide sequence encoding the beta or delta chain comprises SEQ ID NO:219 or a sequence that has at least 90% sequence identity thereto; the nucleotide sequence encoding the alpha or gamma chain comprises SEQ ID NO:229 or a sequence that has at least 90% sequence identity thereto, and the nucleotide sequence encoding the beta or delta chain comprises SEQ ID NO:235 or a sequence that has at least 90% sequence identity thereto; the nucleotide sequence encoding the alpha or gamma chain comprises SEQ ID NO:243 or a sequence that has at least 90% sequence identity thereto, and the nucleotide sequence encoding the beta or delta chain comprises SEQ ID NO:249 or a sequence that has at least 90% sequence identity thereto; the nucleotide sequence encoding the alpha or gamma chain comprises SEQ ID NO:257 or a sequence that has at least 90% sequence identity thereto, and the nucleotide sequence encoding the beta or delta chain comprises SEQ ID NO:263 or a sequence that has at least 90% sequence identity thereto; the nucleotide sequence encoding the alpha or gamma chain comprises SEQ ID NO:273 or a sequence that has at least 90% sequence identity thereto, and the nucleotide sequence encoding the beta or delta chain comprises SEQ ID NO:275 or a sequence that has at least 90% sequence identity thereto; or the nucleotide sequence encoding the alpha or gamma chain comprises SEQ ID NO:283 or a sequence that has at least 90% sequence identity thereto, and the nucleotide sequence encoding the beta or delta chain comprises SEQ ID NO:289 or a sequence that has at least 90% sequence identity thereto.

[0023] In some of any of the embodiments provided herein, the nucleotide sequence encoding the alpha or gamma chain comprises SEQ ID NO:8, and the nucleotide sequence encoding the beta or delta chain comprises SEQ ID NO:16; the nucleotide sequence encoding the alpha or gamma chain comprises SEQ ID NO:26, and the nucleotide sequence encoding the beta or delta chain comprises SEQ ID NO:32; the nucleotide sequence encoding the alpha or gamma chain comprises SEQ ID NO:42, and the nucleotide sequence encoding the beta or delta chain comprises SEQ ID NO:48; the nucleotide sequence encoding the alpha or gamma chain comprises SEQ ID NO:56, and the nucleotide sequence encoding the beta or delta chain comprises SEQ ID NO:62; the nucleotide sequence encoding the alpha or gamma chain comprises SEQ ID NO:70, and the nucleotide sequence encoding the beta or delta chain comprises SEQ ID NO:73; the nucleotide sequence encoding the alpha or gamma chain comprises SEQ ID NO:83, and the nucleotide sequence encoding the beta or delta chain comprises SEQ ID NO:89; the nucleotide sequence encoding the alpha or gamma chain comprises SEQ ID NO:97, and the nucleotide sequence encoding the beta or delta chain comprises SEQ ID NO:103; the nucleotide sequence encoding the alpha or gamma chain comprises SEQ ID NO:111, and the nucleotide sequence encoding the beta or delta chain comprises SEQ ID NO:117; the nucleotide sequence encoding the alpha or gamma chain comprises SEQ ID NO:125, and the nucleotide sequence encoding the beta or delta chain comprises SEQ ID NO:131; the nucleotide sequence encoding the alpha or gamma chain comprises SEQ ID NO:141, and the nucleotide sequence encoding the beta or delta chain comprises SEQ ID NO:147; the nucleotide sequence encoding the alpha or gamma chain comprises SEQ ID NO:157, and the nucleotide sequence encoding the beta or delta chain comprises SEQ ID NO:163; the nucleotide sequence encoding the alpha or gamma chain comprises SEQ ID NO:171, and the nucleotide sequence encoding the beta or delta chain comprises SEQ ID NO:177; the nucleotide sequence encoding the alpha or gamma chain comprises SEQ ID NO:185, and the nucleotide sequence encoding the beta or delta chain comprises SEQ ID NO:191; the nucleotide sequence encoding the alpha or gamma chain comprises SEQ ID NO:199, and the nucleotide sequence encoding the beta or delta chain comprises SEQ ID NO:205; the nucleotide sequence encoding the alpha or gamma chain comprises SEQ ID NO:213, and the nucleotide sequence encoding the beta or delta chain comprises SEQ ID NO:219; the nucleotide sequence encoding the alpha or gamma chain comprises SEQ ID NO:229, and the nucleotide sequence encoding the beta or delta chain comprises SEQ ID NO:235; the nucleotide sequence encoding the alpha or gamma chain comprises SEQ ID NO:243, and the nucleotide sequence encoding the beta or delta chain comprises SEQ ID NO:249; the nucleotide sequence encoding the alpha or gamma chain comprises SEQ ID NO:257, and the nucleotide sequence encoding the beta or delta chain comprises SEQ ID NO:263; the nucleotide sequence encoding the alpha or gamma chain comprises SEQ ID NO:273, and the nucleotide sequence encoding the beta or delta chain comprises SEQ ID NO:275; or the nucleotide sequence encoding the alpha or gamma chain comprises SEQ ID NO:283, and the nucleotide sequence encoding the beta or delta chain comprises SEQ ID NO:289.

[0024] In some of any of the embodiments provided herein, the nucleotide sequence encoding the alpha chain and the nucleotide sequence encoding the beta chain are separated by a peptide sequence that causes ribosome skipping. In some of any of the embodiments provided herein, the peptide that causes ribosome skipping is a P2A peptide. In some of any of the embodiments provided herein, the P2A peptide comprises SEQ ID NO:352. In some of any of the embodiments provided herein, the sequence encoding the P2A peptide is set forth in SEQ ID NO:351.

[0025] In some of any of the embodiments provided herein, the nucleotide sequence encodes SEQ ID NO:18; the nucleotide sequence encodes SEQ ID NO:34; the nucleotide sequence encodes SEQ ID NO:50; the nucleotide sequence encodes SEQ ID NO:64; the nucleotide sequence encodes SEQ ID NO:75; the nucleotide sequence encodes SEQ ID NO:91; the nucleotide sequence encodes SEQ ID NO:105; the nucleotide sequence encodes SEQ ID NO:119; the nucleotide sequence encodes SEQ ID NO: 133; the nucleotide sequence encodes SEQ ID NO: 149; the nucleotide sequence encodes SEQ ID NO: 165; the nucleotide sequence encodes SEQ ID NO: 179; the nucleotide sequence encodes SEQ ID NO: 193; the nucleotide sequence encodes SEQ ID NO:207; the nucleotide sequence encodes SEQ ID NO:221; the nucleotide sequence encodes SEQ ID NO:237; the nucleotide sequence encodes SEQ ID NO:251; the nucleotide sequence encodes SEQ ID NO:265; the nucleotide sequence encodes SEQ ID NO:277; the nucleotide sequence encodes SEQ ID NO:291; the nucleotide sequence encodes SEQ ID NO:367; the nucleotide sequence encodes SEQ ID NO:377; the nucleotide sequence encodes SEQ ID NO:387; the nucleotide sequence encodes SEQ ID NO:397; the nucleotide sequence encodes SEQ ID NO:407; the nucleotide sequence encodes SEQ ID NO:417; the nucleotide sequence encodes SEQ ID NO:427; the nucleotide sequence encodes SEQ ID NO:437; the nucleotide sequence encodes SEQ ID NO:447; the nucleotide sequence encodes SEQ ID NO:457; or the nucleotide sequence encodes SEQ ID NO:487.

[0026] In some of any of the embodiments provided herein, the nucleotide sequence comprises SEQ ID NO:17; the nucleotide sequence comprises SEQ ID NO:33; the nucleotide sequence comprises SEQ ID NO:49; the nucleotide sequence comprises SEQ ID NO:63; the nucleotide sequence comprises SEQ ID NO:74; the nucleotide sequence comprises SEQ ID NO:90; the nucleotide sequence comprises SEQ ID NO: 104; the nucleotide sequence comprises SEQ ID NO: 118; the nucleotide sequence comprises SEQ ID NO:132; the nucleotide sequence comprises SEQ ID NO:148; the nucleotide sequence comprises SEQ ID NO:164; the nucleotide sequence comprises SEQ ID NO:178; the nucleotide sequence comprises SEQ ID NO:192; the nucleotide sequence comprises SEQ ID NO:206; the nucleotide sequence comprises SEQ ID NO:220; the nucleotide sequence comprises SEQ ID NO:236; the nucleotide sequence comprises SEQ ID NO:250; the nucleotide sequence comprises SEQ ID NO:264; the nucleotide sequence comprises SEQ ID NO:276; the nucleotide sequence comprises SEQ ID NO:290; the nucleotide sequence comprises SEQ ID NO:368; the nucleotide sequence comprises SEQ ID NO:378; the nucleotide sequence comprises SEQ ID NO:388; the nucleotide sequence comprises SEQ ID NO:398; the nucleotide sequence comprises SEQ ID NO:408; the nucleotide sequence comprises SEQ ID NO:418; the nucleotide sequence comprises SEQ ID NO:428; the nucleotide sequence comprises SEQ ID NO:438; the nucleotide sequence comprises SEQ ID NO:448; the nucleotide sequence comprises SEQ ID NO:458; or the nucleotide sequence comprises SEQ ID NO:487.

[0027] Also provided herein are vectors comprising any of the polynucleotides provided herein. In some of any of the embodiments provided herein, the vector is a viral vector. In some of any of the embodiments provided herein, the viral vector is a lentiviral vector.

[0028] Also provided herein are engineered cells comprising any of the TCRs or antigen-binding fragment thereof provided herein. Also provided herein are engineered cells comprising any of the polynucleotides provided herein or any of the vectors provided herein. In some of any of the embodiments provided herein, the TCR or antigen-binding fragment thereof is heterologous to the cell. In some of any of the embodiments provided herein, the engineered cell is a cell line. In some of any of the embodiments provided herein, the engineered cell is a primary cell obtained from a subject. In some of any of the embodiments provided herein, the engineered cell is a T cell.

[0029] Also provided herein are methods for producing an engineered cell that involve introducing any of the polynucleotides provided herein or any of the vectors provided herein into a cell to form the engineered cell.

[0030] Also provided herein are compositions comprising any of the TCRs or antigen-binding fragment thereof provided herein, any of the polynucleotides provided herein, any of the vectors provided herein, or any of the engineered cells provided herein. In some of any of the embodiments provided herein, the compositions also include a pharmaceutically acceptable excipient.

[0031] Also provided herein are methods for identifying a TCR targeting a hematopoietically restricted minor histocompatibility antigen (miHA), that involve identifying a functional TCR that recognizes a hematopoietically-restricted miHA, among a plurality of functional TCRs, wherein said plurality of functional TCRs are encoded by a plurality of functional TCR-encoding nucleic acid vectors generated by a high-throughput nucleic acid amplification and assembly method using nucleic acid obtained from a single T cell among a plurality of T cells; wherein said plurality of T cells is from a human female donor that is pregnant with or has been pregnant with a fetus with a mismatched or immunogenic hematopoietically restricted miHA.

[0032] Also provided herein are methods for identifying a TCR targeting a hematopoietically restricted miHA, that involve: (i) generating a plurality of functional TCR-encoding nucleic acid vectors by a high-throughput nucleic acid amplification and assembly method using nucleic acid obtained from a single T cell among a plurality of T cells; wherein said T cell is from a human female donor that is pregnant with or has been pregnant with a fetus with a mismatched or immunogenic hematopoietically restricted miHA; and (ii) identifying a functional TCR that recognizes a hematopoietically-restricted miHA, among a plurality functional TCRs encoded by the plurality of functional TCR-encoding nucleic acid vectors.

[0033] In some of any of the embodiments provided herein, the hematopoietically restricted miHA is a minor histocompatibility antigen HA-1. In some of any of the embodiments provided herein, the identified functional TCR recognizes a peptide epitope of a minor histocompatibility antigen HA-1 in the context of an MHC molecule. In some of any of the embodiments provided herein, the MHC molecule is a human leukocyte antigens (HLA)-A molecule. In some of any of the embodiments provided herein, the HLA-A molecule is of serotype HLA-A*02:01. In some of any of the embodiments provided herein, the HLA-A molecule is of serotype HLA-A*02:06. In some of any of the embodiments provided herein, the peptide epitope of HA-1 is set forth in SEQ ID NO:354.

[0034] In some of any of the embodiments provided herein, the T cell from the human female donor is cultured under conditions for cell expansion of the T cell prior to the generating of the plurality of functional TCR-encoding nucleic acid vectors.

[0035] In some of any of the embodiments provided herein, the T cell from the human female donor is not cultured under conditions for cell expansion of the T cell prior to the generating of the plurality of functional TCR-encoding nucleic acid vectors.

[0036] In some of any of the embodiments provided herein, the high-throughput nucleic acid amplification and assembly involves: (1) amplifying a first amplification product and a second amplification product from complementary DNA (cDNA) generated from RNA obtained from the single T cell among the plurality of T cells sorted into each of a plurality of separate locations of a device, wherein: said first amplification product comprises a nucleotide sequence encoding a full-length Vα region or a full-length Vγ region of a TCR, and said second amplification product comprises a nucleotide sequence encoding a full-length Vβ region or a full-length Vδ region of a TCR; and (2) assembling said first amplification product and said second amplification product from each of said plurality of separate locations into a nucleic acid vector to obtain an assembled nucleic acid vector comprising a nucleotide sequence encoding a functional TCR for each of said plurality of separate locations; and said functional TCR comprises (i) a full-length Vα region and a full-length Vβ region from said single T cell or (ii) a full-length Vγ region and a full-length Vδ region from said single T cell.

[0037] Also provided herein are engineered cells comprising the TCR identified by any of the methods described herein. Also provided herein are compositions comprising any of the engineered cells provided herein. In some of any of the embodiments provided herein, the composition also comprises a pharmaceutically acceptable excipient.

[0038] Also provided herein are methods of treatment that involve administering any of the TCRs or antigen-binding fragment thereof provided herein, any of the polynucleotides provided herein, any of the vectors provided herein, any of the engineered cells provided herein, or any of the compositions provided herein, to a subject having a disease or a disorder. Also provided herein are any of the TCRs or antigen-binding fragment thereof provided herein, any of the polynucleotides provided herein, any of the vectors provided herein, any of the engineered cells provided herein, or any of the compositions provided herein, for use in the treatment of a disease or a disorder in a subject. Also provided herein are uses of any of the TCRs or antigen-binding fragment thereof provided herein, any of the polynucleotides provided herein, any of the vectors provided herein, any of the engineered cells provided herein, or any of the compositions provided herein in the manufacture of a medicament for the treatment of a disease or a disorder in a subject. Also provided herein are uses of any of the TCRs or antigen-binding fragment thereof provided herein, any of the polynucleotides provided herein, any of the vectors provided herein, any of the engineered cells provided herein, or any of the compositions provided herein, for the treatment of a disease or a disorder in a subject.

[0039] In some of any of the embodiments provided herein, the subject is eligible for or is to receive an allogeneic hematopoietic stem cell transplantation (HSCT). In some of any of the embodiments provided herein, the subject has or has been diagnosed with a malignant hematologic disorder. In some of any of the embodiments provided herein, the subject has or has been diagnosed with acute myeloid leukemia (AML), myelodysplastic syndrome (MDS), or acute lymphoblastic leukemia (ALL). In some of any of the embodiments provided herein, the subject has or has been diagnosed with a liquid tumor, a hematopoietic tumor, a lymphoma, or chronic myeloid leukemia CML. In some of any of the embodiments provided herein, administration of the engineered cell or the composition induces or enhances cells death of cells associated with the malignant hematologic disorder, or induces or enhances a graft versus leukemia effect (GVL) in the subject.

### BRIEF DESCRIPTION OF THE DRAWINGS

[0040] FIG. 1 shows FACS analysis of expanded donor cells, PBMCs alone (left panel) or PBMCs co-cultured with B cells from the same donor (B-APCs; right panel), double-stained with miHA-1 dextramers labeled with either FITC or APC.

[0041] FIG. 2 shows FACS plot analysis of controls used to screen for miHA-1 specific TCRs. An empty vector and a non-HA-1 specific TCR served as negative controls, and an exemplary HA-1 targeting TCR was used as a positive control.

[0042] FIG. 3 shows a plot of TRAV, TRBV expression and % of CD3 as assessed by FACS, in 701 TCR clones transiently expressed in HEK 293 cells. Clones that exhibited higher surface TCR expression than the positive control are shown in blue, clones that exhibited lower surface TCR expression than the negative control are shown in yellow, and those in between the two controls are shown in green.

[0043] FIG. 4A shows an FACS-based assessment of individual TCRs expressed in HEK 293 cells to determine transfection efficiency, as indicated by mCherry and IP26 staining. FIG. 4B shows FACS analysis of individual TCRs expressed in HEK 293 stained with HA-1 “H” dextramer.

[0044] FIG. 5 shows TCR expression in relation to beta chain variants (TRBV), following sequencing of amplified TRBVs in a screen of 704 receptors.

[0045] FIG. 6 shows the distribution of non-singleton clones between unexpanded and expanded cultures, including those expanded in the presence of the naked HA-1 peptide or HA-1 presented by donor B cells.

[0046] FIG. 7 shows the percentage of CD3 cells that were stained positive for the HA-1 “H” dextramer, among 704 clones obtained from the parous woman and re-expressed in reporter cells.

[0047] FIG. 8 shows an EC₅₀ assessment from a CD69 activation study of reporter cells expressing one of 16 exemplary anti-HA-1 TCRs.

[0048] FIG. 9 shows an assessment of TCR binding in the presence of either the HA-1 “H” peptide or the HA-1 “R” peptide.

[0049] FIG. 10 shows an IL-2 secretion assay, wherein the functionality of Jurkat T cells transduced with HA-1 targeting TCRs was assessed in the presence of APCs presenting the target “H” peptide.

[0050] FIG. 11 shows an IL-2 secretion assay, which assessed the functionality of Jurkat T cells transduced with HA-1 targeting TCRs in response to APCs presenting either the HA-1 “H” or the HA-1 “R” peptide.

[0051] FIG. 12 shows the results of an EC₅₀ assessment from a CD69 activation study of Jurkat T cells expressing various TCR candidates after an overnight incubation with A*0201 LCLs and increasing concentrations of the HA-1 “H” peptide.

[0052] FIG. 13A shows a representative EC₅₀ assessment, wherein Jurkat T cells expressing an exemplary HA-1 specific TCR were assessed for CD69 activation in response to increasing concentrations of HA-1 peptide. FIG. 13B shows the results of experiments to determine the EC₅₀ of an exemplary TCR in the presence of increasing concentrations of HA-1.

[0053] FIG. 14 shows a comparison of the EC₅₀ determined for an exemplary TCR with reconstructed CD69 activation data from known HA-1 specific TCRs.

[0054] FIG. 15 shows CD69 activation of exemplary anti-HA-1 TCR expressing cells in response to different HA-1 peptide alleles presented by HLA-A*02:01 LCLs and non-HLA-A*02:01 LCLs.

[0055] FIG. 16 shows A*0201/HA-1 dextramer staining of an exemplary HA-1 TCR expressed in human primary T cells.

[0056] FIG. 17 shows flow cytometry plots of cell populations in a cell killing assay, wherein LCLs loaded with the HA-1 “H” or “R” were labeled with CFSE to indicate killing and target specificity by HA-1 specific TCRs expressed in primary human cells.

[0057] FIG. 18A shows cell counts of HA-1 “H”- and HA-1 “R”—loaded LCLs following exposure to non-transduced T cells at increasing effector to target (E:T) ratios. FIG. 18B shows cell counts of HA-1 “H”- and HA-1 “R”—loaded LCLs following exposure to HA-1 specific TCRs expressed in human primary T cells at increasing effector to target (E:T) ratios.

### DETAILED DESCRIPTION

[0058] Provided herein are TCRs, such as recombinant TCRs, such as those that bind or recognize a peptide epitope associated with a hematopoietically-restricted minor histocompatibility antigen, e.g., HA-1, such as a peptide epitope expressed on the surface of a cell in the context of an MHC molecule. Among the provided embodiments are approaches useful in the treatment of such diseases and conditions and/or for targeting cell types, such as cancer cells or cells associated with a hematological ailment. In some embodiments, the provided TCRs and antigen-binding fragments thereof, bind or recognize a peptide epitope of HA-1, in the context of an MHC molecule.

[0059] Also provided herein are nucleic acid molecules encoding the TCRs, engineered cells containing the TCRs, compositions containing the TCRs or cells, and methods of treatment or uses, such as therapeutic uses, involving administering such TCRs, engineered cells or compositions, and uses of such TCRs, cells or compositions. In some aspects, engineered cells that express a provided TCR or antigen binding fragment thereof, exhibit cytotoxic activity against target cells expressing the peptide epitope, such as cancer cells or cells associated with a hematological ailment. Also provided herein are methods for identifying a TCR targeting a hematopoietically restricted miHA.

[0060] Allogeneic Stem Cell Transplantation (Allo-SCT) can be a curative therapy for patients with hematologic malignancies as well as for patients with nonmalignant but medically serious conditions such as hemoglobinopathies, thalassemias and autoimmune diseases. AlloSCT can also be used to create tolerance to transplanted solid organs. Mature αβ T cells contained in the donor allograft play important roles and can be considered in two broad classes. One class promotes the reconstitution of anti-pathogen immunity, especially through the transfer of memory T cells. A second class of T cells, called alloreactive T cells, recognizes the patient as “non-self”. When alloSCT is used for the treatment of hematological malignancies, alloreactive donor T cells can kill malignant cells, thereby mediating a graft-versus-leukemia (GVL) effect. However, they can also cause graft-versus-host disease (GVHD), wherein alloreactive T cells attack healthy host tissues, including, e.g., the skin, bowel and liver.

[0061] In a human leukocyte antigen (HLA) matched alloSCT, alloreactive T cells target miHAs, the peptide products of coding polymorphisms that distinguish recipients from donors. Importantly, alloreactive CD8+ T cells that target miHAs with expression limited to hematopoietic cells are unlikely to cause GVHD. Administering anti-miHA T cells could minimize the risk of widespread toxicity without compromising therapeutic efficacy in the context of augmenting alloSCT or as a standalone therapy, among other strategies.

[0062] Cell therapies (including those involving the administration of cells expressing recombinant receptors or TCRs specific for a disease or disorder of interest, such as a recombinant TCR and/or other recombinant antigen receptors), as well as other adoptive immune cell and adoptive T cell therapies can be effective in the treatment of diseases and disorders. In certain contexts, available approaches to adoptive cell therapy may not always be entirely satisfactory. In some contexts, optimal efficacy can depend on the ability of the administered cells to express the recombinant receptor, and for the recombinant receptor to recognize and bind to a target, e.g., target antigen, such as peptide epitopes of HA-1, within the subject, for example, based on the affinity of the antigen-binding domain of the TCR to its target antigen. In some cases, consistency and/or efficiency of expression of the recombinant receptor, and activity of the receptor is limited in certain cells or certain cell populations of available therapeutic approaches.

[0063] In some aspects, development of a humanized and/or fully human recombinant TCR presents technical challenges. For example, in some aspects, a humanized and/or a fully human recombinant TCR, when engineered into a human T cell, competes with endogenous TCR complexes and/or can form mispairings with endogenous TCR chains, which may, in certain aspects, reduce recombinant TCR signaling, activity, and/or expression, and ultimately result in reduced activity of the engineered cells. For example, in some cases, suboptimal expression of an engineered or recombinant TCR can occur due to competition with an endogenous TCR and/or with TCRs having mispaired chains, for signaling molecules and/or domains such as the invariant CD3 signaling molecules (e.g., availability of co-expressed CD3 8, &, γ and/or (chains) that are involved in permitting expression of the complex on the cell surface. In some aspects, available CD3 molecules can limit the expression and function of the TCRs in the cells.

[0064] In some aspects, the provided embodiments are based on observations of improved affinity, expression or activity of an exemplary fully human recombinant TCR, such as certain provided TCRs specific to HA-1, even at a low effector to target (E:T) ratio. The activity of the engineered T cells expressing a recombinant TCR, e.g., cytokine secretion and/or cytolytic activity, in some cases may be limited when fewer engineered T cells are present compared to the target cells. In some aspects, such improvements in activity, particularly at a low E:T ratio and using fully human sequences, are advantageous in improving the efficacy of the therapy.

[0065] In some cases, certain available approaches to obtain antigen-specific recombinant receptors, such as recombinant TCRs, can result in recombinant receptors that exhibit cross reactivity to a different, non-target antigen (see, e.g., Cameron et al., (2013) Science Translational Medicine, 5(197): 197ra103). In some aspects, the provided embodiments are based on observations that as described herein, for example, that certain provided TCRs specific to a particular immunogenic HA-1 peptide presented by HLA subtype A*0201, do not show cross reactivity to cells expressing other peptide antigens or alloreactivity to other HLA subtypes. The provided TCRs thus exhibit improved expression and activity, with minimal risk of cross reactivity to other antigens, such as non-target antigens, that can be present in the subject, or peptide epitopes presented via non-target HLA subtypes.

[0066] In some aspects, therapeutic approaches using such TCRs, for example adoptive cell therapy with engineered human T cells expressing the provided recombinant TCRs, can ultimately result in high efficacy, for example, by improving the GVL effect. In some contexts, the provided embodiments, including the TCRs, polynucleotides encoding such TCRs, engineered cells and cell compositions, can provide various advantages over available therapies with TCRs, to improve the activity of the recombinant receptors and response to adoptive cell therapies targeting cancer cells and cells associated with hematological ailments.

[0067] All publications, including patent documents, scientific articles and databases, referred to in this application are incorporated by reference in their entirety for all purposes to the same extent as if each individual publication were individually incorporated by reference. If a definition set forth herein is contrary to or otherwise inconsistent with a definition set forth in the patents, applications, published applications and other publications that are herein incorporated by reference, the definition set forth herein prevails over the definition that is incorporated herein by reference.

[0068] The section headings used herein are for organizational purposes only and are not to be construed as limiting the subject matter described.

### I. T Cell Receptors Targeting Histocompatibility Antigen 1 (Ha-1)

[0069] Provided herein are TCRs, such as those that bind or recognize a peptide epitope associated with a hematopoietically restricted miHA, such as a peptide epitope expressed on the surface of a cancer cell and/or a cell associated with a hematological ailment, in the context of an MHC molecule. In some embodiments, the provided TCRs bind or recognize a peptide epitope of miHA HA-1, in the context of an MHC molecule. Such TCRs and antigen-binding fragments exhibit antigenic specificity for binding or recognizing such peptide epitopes. Also provided in some embodiments are nucleic acid molecules encoding the TCRs, engineered cells expressing the TCRs, compositions and methods of treatment involving administering such TCRs, engineered cells or compositions. In some aspects, engineered cells that express a provided TCR or antigen-binding fragment, exhibit cytotoxic activity against target cells expressing the peptide epitope, such as cancer cells or cells that are associated with a hematological ailment.

### A. Allogeneic Stem Cell Transplantation

[0070] AlloSCT is a curative treatment option for patients with hematologic malignancies. In an alloSCT, patients receive a conditioning regimen, consisting of chemotherapy sometimes with radiation therapy, which facilitates the transplant by killing some residual malignant cells, by creating space in the recipient's bone marrow for donor stem cell engraftment, and by killing patient immune cells that can mediate donor allograft rejection.

[0071] Mature alpha/beta donor T cells contained in the donor graft play important roles and can be considered in two broad classes. One class promotes the reconstitution of anti-pathogen immunity, especially through the transfer of memory T cells. A second class of T cells recognizes the patient as “nonself.” These so called “alloreactive” T cells have both positive and detrimental effects. A critical benefit of these cells is that they can kill recipient malignant cells mediating the GVL effect. Alloreactive T cells can also kill normal patient or host hematopoietic and immune cells, which both creates space for engrafting cells and reduces immunologic rejection of the donor cells. However, donor T cells can also attack normal recipient tissues, causing GVHD. Therefore, all patients receive some type of systemic immunosuppression to reduce the frequency and severity of GVHD.

[0072] Despite the GVL effect, relapsed malignancy is the largest single cause of treatment failure and death in recipients of an alloSCT in treatment of a blood neoplasm. There is good reason to believe that relapse can be reduced by engineering a more effective alloreactive T cell response. GVHD and the consequences of systemic immunosuppression (such as infection) are the other major causes of morbidity and mortality. These too could be mitigated if the allo-response was better engineered to focus on hematopoietic cells and not normal host tissues. Despite these limitations, alloSCT is the worldwide standard of care for patients with moderate to high-risk hematologic malignancies supported by data from multiple sources that support higher rates of survival with than without a transplant.

[0073] In HLA-matched alloSCT, alloreactive donor T cells target miHAs expressed in the recipient. MiHAs are the peptide products of coding polymorphisms that distinguish recipients from donors. These polymorphisms are present in stable known frequencies in the population and are inherited by Mendelian genetics. Some of the genes that encode miHAs are similarly expressed in a wide spectrum of tissues, whereas others are relatively restricted to hematopoietic cells. As currently practiced, there is no control over which miHAs will be targeted in an alloSCT. Because T cell responses against miHAs expressed on normal tissues are nearly always generated, severe GVHD is a major risk, and therefore immunosuppression is required. In contrast, miHAs with expression relatively limited to hematopoietic cells are considered ideal targets for immunotherapy with donor derived CD8+ T cells, in conjunction with an alloSCT. CD8+ T cells that target such antigens can kill recipient malignant blood cells mediating the GVL effect. T cells that target hematopoietically restricted antigen can mediate graft-versus-leukemia and promote engraftment with a low risk for graft-vs-host disease. They can also kill nonmalignant recipient hematopoietic cells, including immune cells, thereby promoting engraftment and reducing the risk of immunologic rejection. Interestingly, CD8+ T cells that target hematopoietically-restricted miHAs have a low risk of causing GVHD.

[0074] CD8+ T cells recognize their targets through their antigen receptors (TCRs). The process that generates these receptors creates a highly diverse repertoire of unique TCRs with each person estimated to contain T cells expressing more than 107 unique receptors. This diversity allows people to respond not only to a wide range of pathogens but also to miHAs. Unlike antibodies, which bind to intact proteins, TCRs recognize short peptides, usually about 8-12 amino acids in length, embedded in the surface of MHC molecules, which are expressed on the surface of cells.

[0075] An advantage of this system of antigen detection is that T cells can recognize peptides derived from any protein, even those that are not expressed on the cell surface. Through evolution, MHC molecules have become diverse in the population with most of the variation being in the parts of the MHC molecule that bind peptide, and which present or display the peptide to the TCR. This allows for a large diversity of peptides that can be presented to T cells by MHC molecules with preference or restriction of certain peptides to specific MHC molecules. A consequence of this is that each miHA is generally restricted to a single MHC type. Importantly, over the last several decades, more than 50 relatively hematopoietically-restricted miHAs have been identified, a number more than sufficient such that nearly every donor/recipient combination, regardless of MHC type, would have a targetable hematopoietically-restricted miHA.

### B. Histocompatibility Antigen 1 (HA-1)

[0076] HA-1 is a hematopoietically restricted miHA that has been found on Hofbauer and trophoblast cells in the human placenta, and is important for bone marrow transplantation outcomes. The antigenic peptide that arises from HA-1 results from a single nucleotide difference between the non-immunogenic (“R peptide”) comprising the amino acid sequence VLRDDLLEA (SEQ ID NO:355) and the immunogenic (“H peptide”) comprising the amino acid sequence VLHDDLLEA (SEQ ID NO:354). The immunogenic peptide can be presented in the context of at least four different Class I MHC molecules, including HLA-A*0201, A*0206, B*60, and B*40012. As a result of the immunogenic single nucleotide polymorphism (SNP), the binding affinity of the HA-1 H peptide to the HLA-A*0201 peptide binding groove on antigen presenting cells (APCs) is increased, thus leading to an immunogenic peptide that can be recognized by HLA-A*0201 restricted T cells.

[0077] The difference in immunogenicity of these peptides could be due to various factors. For example, the proteasomal cleavage and transport of the two peptides into the endoplasmic reticulum via TAP is similar, and both variants can bind to the HLA-restricting allele. However, the R peptide has lower affinity and less stable binding to HLA-A*0201 likely related to the relatively large size of the arginine residue that results in steric and electrostatic hindrance with HLA-A*0201 D pocket residues. Differences in both MHC molecule and TCR binding can account for the immunogenicity of the HA-1 H peptide.

[0078] In some examples, the miHA HA-1 H peptide (VLHDDLLEA; SEQ ID NO:354) is targeted, and not the non-immunogenic R peptide (VLRDDLLEA; SEQ ID NO:355). HA-1 is ideal in that its expression is limited to hematopoietic cells, presented (or “restricted”) by the most common human HLA type and has an allele frequency of about 50%. See de Bueger et al. (1992) J Immunol Baltim Md 1950 149(5): 1788-1794 and Wilke et al. (2003) Hematol. J. 4(5):315-320.

[0079] In some aspects, the TCR recognizes or binds an HA-1 epitope in the context of an MHC molecule, such as an MHC Class I molecule. In some aspects, the MHC Class I molecule is an HLA-A2 molecule, including any one or more subtypes thereof, e.g., HLA-A*0201, *0202, *0203, *0206, or *0207. In some cases, there can be differences in the frequency of subtypes between different populations. For example, in some embodiments, more than 95% of the HLA-A2 positive Caucasian population is HLA-A*0201, whereas in the Chinese population the frequency has been reported to be approximately 23% HLA-A*0201, 45% HLA-A*0207, 8% HLA-A*0206, and 23% HLA-A*0203. In some embodiments, the MHC molecule is HLA-A*0201.

[0080] In some aspects, the provided TCRs or antigen-binding fragments thereof recognize or bind to an immunogenic (e.g., mismatched between donor and recipient of alloSCT) epitope or domain of HA-1, such as the immunogenic H peptide comprising the amino acid sequence VLHDDLLEA (SEQ ID NO:354). In some aspects, the provided TCRs or antigen-binding fragments thereof recognize or bind to a non-immunogenic epitope or domain of HA-1, such as the non-immunogenic R peptide comprising the amino acid sequence VLRDDLLEA (SEQ ID NO:355).

[0081] In some embodiments, the TCR, or antigen-binding fragment thereof, is isolated or purified or is recombinant. In particular embodiments, any of the provided TCRs, or antigen-binding fragments thereof, are recombinant. In some aspects, the TCR, or antigen-binding fragment thereof, is human. In some aspects, the TCR is a single chain. In other embodiments, the TCR contains two chains. In some embodiments, the TCR, or antigen-binding fragment thereof, is expressed on the surface of a cell (e.g., a T cell such as a T cell designed to lack expression of endogenous TCRs).

[0082] In some aspects, the provided TCRs have one or more specified functional features, such as binding properties, including binding to particular epitopes, and/or particular binding affinities, for example, as described herein. In some aspects, engineered cells, such as T cells, expressing the provided TCRs have one or more specified functional features, such as binding properties, including binding to particular epitopes, particular binding affinities, activation or stimulation of cell signaling, such as T cell signaling or TCR signaling, secretion of cytokines, and/or killing of target cells expressing or presenting the antigen, for example, as described herein.

[0083] In some embodiments, the provided binding molecule is a TCR or antigen-binding fragment thereof. In some embodiments, a TCR is a molecule that contains an alpha chain comprising a Vα region and a beta chain comprising a Vβ region (also known as TCRα and TCRβ, respectively) or a gamma chain comprising a Vγ region and a delta chain comprising a Vδ region (also known as TCRγ and TCRδ, respectively), or antigen-binding portions thereof, which is capable of specifically binding to an antigen, e.g., a peptide antigen or peptide epitope bound to an MHC molecule. In some embodiments, the TCR is in the αβ form (e.g., is an αβ TCR). In some embodiments, the TCR is in the γδ form (e.g., is an γδ TCR). Typically, TCRs that exist in αβ or γδ forms are generally structurally similar, but T cells expressing them may have distinct anatomical locations or functions. A TCR can be found on the surface of a cell or in soluble form. Generally, a TCR is found on the surface of T cells where it is generally responsible for recognizing antigens, such as peptides bound to MHC molecules.

[0084] In some embodiments, a TCR provided herein can be an intact or full-length TCR, such as a TCR containing a full length a chain and a full length β chain, or a TCR containing a full length γ chain and a full length δ chain. In some embodiments, an antigen-binding portion of a TCR provided herein can be less than a full-length TCR provided that it binds to a specific peptide bound in an MHC molecule, such as it binds to an MHC-peptide complex. In some cases, an antigen-binding portion or fragment of a TCR can contain only a portion of the structural domains of a full-length or intact TCR, but yet is able to bind the peptide epitope, such as MHC-peptide complex, to which the full-length TCR binds. In some cases, an antigen-binding portion contains the variable domains of a TCR, such as a Vα region and a Vβ region of a TCR, or a Vγ region and a Vδ region of a TCR provided herein provided that that antigen-binding portion is sufficient to form a binding site for binding to a specific MHC-peptide complex.

[0085] In some embodiments, the variable domains of the TCR contain CDRs, which generally are contributors to antigen recognition and binding capabilities and specificity of the peptide, MHC molecule, and/or MHC-peptide complex. In some embodiments, a CDR of a TCR or combination thereof forms all or substantially all of the antigen-binding site of a given TCR molecule. The various CDRs within a variable region of a TCR chain generally are separated by framework regions (FRs), which generally display less variability among TCRs as compared to the CDRs (see, e.g., Jores et al., Proc. Nat'l Acad. Sci. U.S.A. 87:9138, 1990; Chothia et al., EMBO J. 7:3745, 1988; see also Lefranc et al., Dev. Comp. Immunol. 27:55, 2003). In some embodiments, CDR-3 is the main CDR responsible for antigen binding or specificity, or is the most important among the three CDRs on a given TCR variable region for antigen recognition, and/or for interaction with the processed peptide portion of the peptide-MHC complex. In some contexts, CDR-1 of the alpha chain can interact with the N-terminal part of certain antigenic peptides. In some contexts, CDR-1 of the beta chain can interact with the C-terminal part of the peptide. In some contexts, CDR-2 contributes most strongly to or is the primary CDR responsible for the interaction with or recognition of the MHC portion of the MHC-peptide complex. In some embodiments, the variable region of the β-chain can contain a further hypervariable region (e.g., CDR4 or HVR4), which generally is involved in superantigen binding and not antigen recognition (Kotb (1995) Clinical Microbiology Reviews, 8:411-426).

[0086] In some embodiments, the a chain and/or the B chain of a TCR, or the γ chain and/or the δ chain of a TCR, also can contain a constant domain, a transmembrane domain and/or a short cytoplasmic tail (see, e.g., Janeway et al., Immunobiology: The Immune System in Health and Disease, 3^{rd} Ed., Current Biology Publications, p. 4:33, 1997). In some aspects, each chain (e.g. alpha or beta) of the TCR can possess one N-terminal immunoglobulin variable domain, one immunoglobulin constant domain, a transmembrane region, and a short cytoplasmic tail at the C-terminal end. In some embodiments, a TCR, for example via the cytoplasmic tail, is associated with invariant proteins of the CD3 complex involved in mediating signal transduction. In some cases, the structure allows the TCR to associate with other molecules like CD3 and subunits thereof. For example, a TCR containing constant domains with a transmembrane region may anchor the protein in the cell membrane and associate with invariant subunits of the CD3 signaling apparatus or complex. The intracellular tails of CD3 signaling subunits (e.g. CD3γ, CD3δ, CD3ε and CD3ζ chains) contain one or more immunoreceptor tyrosine-based activation motif or ITAM and generally are involved in the signaling capacity of the TCR complex.

[0087] The various domains or regions of a TCR can be identified. In some cases, the exact locus of a domain or region can vary depending on the particular structural or homology modeling or other features used to describe a particular domain. It is understood that reference to amino acids, including to a specific sequence set forth as a SEQ ID NO: used to describe domain organization of a TCR are for illustrative purposes and are not meant to limit the scope of the embodiments provided. In some cases, the specific domain (e.g. variable or constant) can be several amino acids (such as one, two, three or four) longer or shorter. In some aspects, residues of a TCR are known or can be identified according to the International Immunogenetics Information System (IMGT) numbering system (see e.g. www.imgt.org; see also, Lefranc et al. (2003) Developmental and Comparative Immunology, 27(1);55-77; and The T Cell Factsbook 2nd Edition, Lefranc and LeFranc Academic Press 2001). Using this system, CDR-1 sequences within a TCR Vα region and/or Vβ region in some cases correspond to the amino acids present between residue numbers 27-38, inclusive, CDR-2 sequences within a TCR Vα region and/or Vβ region in some cases correspond to the amino acids present between residue numbers 56-65, inclusive, and CDR-3 sequences within a TCR Vα region and/or Vβ region in some cases correspond to the amino acids present between residue numbers 105-117, inclusive.

[0088] In some embodiments, among the TCRs or antigen-binding fragments thereof provided herein are those that bind to or recognize a hematopoietically restricted minor histocompatibility antigen, such as HA-1, in the context of an MHC molecule. In some embodiments, among the TCRs or antigen-binding fragments thereof provided herein are those that recognize or bind to an immunogenic (e.g., mismatched between donor and recipient of alloSCT) epitope or domain of HA-1, such as the immunogenic H peptide comprising the amino acid sequence VLHDDLLEA (SEQ ID NO:354). In some embodiments, among the TCRs or antigen-binding fragments thereof provided herein are those that do not recognize or binds to a non-immunogenic epitope or domain of HA-1, such as the non-immunogenic R peptide comprising the amino acid sequence VLRDDLLEA (SEQ ID NO:355). In some embodiments, among the TCRs or antigen-binding fragments thereof provided herein are those that preferentially or selectively recognize or bind to an immunogenic (e.g., mismatched between donor and recipient of alloSCT) epitope or domain of HA-1, such as the immunogenic H peptide comprising the amino acid sequence VLHDDLLEA (SEQ ID NO:354), and do not recognize or bind to a non-immunogenic epitope or domain of HA-1, such as the non-immunogenic R peptide comprising the amino acid sequence VLRDDLLEA (SEQ ID NO:355), or exhibits a reduced affinity or selectivity for binding to the non-immunogenic epitope.

[0089] In some aspects, among the TCRs or antigen-binding fragments thereof provided herein are those that bind to or recognize an epitope of HA-1, such as the immunogenic H peptide comprising the amino acid sequence VLHDDLLEA (SEQ ID NO:354), that is complexed with an MHC molecule of a particular HLA type, such as HLA-A*02:01. In some aspects, among the TCRs or antigen-binding fragments thereof provided herein are those that bind to or recognize an epitope of HA-1, that is complexed with an MHC molecule of a particular HLA type, such as HLA-A*02:06 or B*40:01.

[0090] In some embodiments, a TCR provided herein is a full-length TCR. In some embodiments, a TCR provided herein is a dimeric TCR (dTCR). In some embodiments, TCR provided herein is a single-chain TCR (sc-TCR). A TCR provided herein may be cell-bound or in soluble form. In some embodiments, a TCR provided herein is in cell-bound form expressed on the surface of a cell (e.g., a T cell such as a T cell designed to lack expression of endogenous TCRs).

[0091] In some embodiments, a TCR provided herein is a scTCR, which is a single amino acid strand containing an a chain and a β chain that is able to bind to MHC-peptide complexes. Typically, a scTCR can be generated as described elsewhere, see, e.g., WO 96/13593, WO 96/18105, WO99/18129, WO 04/033685, WO2006/037960, WO2011/044186; U.S. Pat. No. 7,569,664; and Schlueter, C. J. et al. J. Mol. Biol. 256, 859 (1996).

### C. Exemplary Variable Domains

[0092] Provided herein are TCRs or antigen-binding fragments thereof that recognize or bind an epitope or region of a hematopoietically restricted minor histocompatibility antigen, such as HA-1, in the context of an MHC molecule. In some aspects, the HA-1 peptide is an immunogenic peptide (an allele of HA-1 that is mismatched between the donor and the recipient of an alloSCT). Provided are exemplary sequences (e.g. CDRs, Vα and/or VB, or Vγ and/or Vδ, and constant region sequences) of HA-1-specific TCRs.

[0093] In some embodiments, a TCR or antigen-binding fragment thereof provided herein binds to or recognizes an immunogenic HA-1 allele presented on the surface of leukemia cells of the recipient of an alloSCT. In some aspects, cytotoxic activity of T cells expressing the anti-HA-1 TCRs, is stimulated upon contact of the T cells with target cells presenting or expressing the antigen, such as an immunogenic HA-1 peptide. In some embodiments, among the provided TCRs or antigen-binding fragments thereof provided herein are those that bind or recognize a peptide epitope of HA-1 (e.g. a peptide epitope of an immunogenic allele of HA-1) in the context of an MHC, such as a particular MHC or a particular HLA subtype.

[0094] Among such TCRs or antigen-binding fragments thereof are TCRs or antigen-binding fragments thereof that contain any of the Vα region and Vβ region, or Vγ region and Vδ region, sequences as described, individually, or a sufficient antigen-binding portion of such sequences. In some embodiments, the provided TCRs or antigen-binding fragments thereof (e.g. anti-HA-1 TCRs) contain a Vα or Vγ region sequence or sufficient antigen-binding portion thereof that contains a CDR-1, a CDR-2 and/or a CDR-3 as described herein. In some embodiments, the provided TCRs or antigen-binding fragments thereof (e.g., anti-HA-1 TCRs) contain a Vβ or Vδ region sequence or sufficient antigen-binding portion thereof that contains a CDR-1, a CDR-2 and/or a CDR-3 as described herein. In some embodiments, the TCRs or antigen-binding fragments thereof (e.g. anti-HA-1 TCRs) contain a Vα or Vγ region sequence that contains a CDR-1, a CDR-2 and/or a CDR-3 as described herein and contain a Vβ or Vδ region sequence that contains a CDR-1, a CDR-2 and/or a CDR-3 as described herein. Also among the provided TCRs are those having sequences at least at or about 90%, 91%, 92%, 93%, 94%, 95%, 96%, 97%, 98%, or 99% identical to such a sequence.

[0095] In some embodiments, a TCR or antigen-binding fragment thereof provided herein contains a Vα or Vγ region containing a CDR-3 comprising an amino acid sequence set forth in any of SEQ ID NOs: 3, 21, 37, 51, 65, 78, 92, 106, 120, 136, 152, 166, 180, 194, 208, 224, 238, 252, 268, 278, 359, 369, 379, 389, 399, 409, 419, 429, 439, 449, 459, 460, 461, 462, 463, 464, 470, 471, 472, 473, 474, 476, 477, and 480, or a sequence having at least at or about 90%, 91%, 92%, 93%, 94%, 95%, 96%, 97%, 98%, or 99% identity with such a sequence. In some aspects, a TCR or antigen-binding fragment thereof provided herein contains a Vα or Vγ region containing a CDR-3 contained within the amino acid sequence set forth in any of SEQ ID NOs: 4, 22, 38, 52, 66, 79, 93, 107, 121, 137, 153, 167, 181, 195, 209, 225, 239, 253, 269, 279, 360, 370, 380, 390, 400, 410, 420, 430, 440, 450, and 481 or a sequence at least at or about 90%, 91%, 92%, 93%, 94%, 95%, 96%, 97%, 98%, or 99% identical with such a sequence.

[0096] In some embodiments, the Vα or Vγ region contains a CDR-1 comprising an amino acid sequence set forth in any of SEQ ID NOs: 1, 19, 35, 76, 134, 150, 222, and 266, or a sequence having at least at or about 90%, 91%, 92%, 93%, 94%, 95%, 96%, 97%, 98%, or 99% identity with such a sequence. In some aspects, the Vα or Vγ region contains a CDR-1 contained within the amino acid sequence set forth in any of SEQ ID NOs: 4, 22, 38, 52, 66, 79, 93, 107, 121, 137, 153, 167, 181, 195, 209, 225, 239, 253, 269, 279, 360, 370, 380, 390, 400, 410, 420, 430, 440, 450, and 481, or a sequence having at least at or about 90%, 91%, 92%, 93%, 94%, 95%, 96%, 97%, 98%, or 99% identity with such a sequence. In some embodiments, the Vα or Vγ region contains a CDR-2 comprising an amino acid sequence set forth in any of SEQ ID NOs: 2, 20, 36, 77, 135, 151, 223, and 267, or a sequence having at least at or about 90%, 91%, 92%, 93%, 94%, 95%, 96%, 97%, 98%, or 99% identity with such a sequence. In some embodiments, the Vα or Vγ region contains a CDR-2 contained within the amino acid sequence set forth in any of SEQ ID NOs: 4, 22, 38, 52, 66, 79, 93, 107, 121, 137, 153, 167, 181, 195, 209, 225, 239, 253, 269, 279, 360, 370, 380, 390, 400, 410, 420, 430, 440, 450, and 481, or a sequence having at least at or about 90%, 91%, 92%, 93%, 94%, 95%, 96%, 97%, 98%, or 99% identity with such a sequence.

[0097] In some instances, a TCR or antigen-binding fragment thereof provided herein contains a Vβ or Vδ region containing a CDR-3 comprising an amino acid sequence set forth in any of SEQ ID NOs: 11, 27, 43, 57, 84, 98, 112, 126, 142, 158, 172, 186, 200, 214, 230, 244, 258, 284, 363, 373, 383, 393, 403, 413, 423, 433, 443, 453, 465, 466, 467, 468, 469, 475, 478, 479, and 484 or a sequence having at least at or about 90%, 91%, 92%, 93%, 94%, 95%, 96%, 97%, 98%, or 99% identity with such a sequence. In some embodiments, a TCR or antigen-binding fragment thereof provided herein contains a Vβ or Vδ region containing a CDR-3 contained within the amino acid sequence set forth in any of SEQ ID NOs: 12, 28, 44, 58, 85, 99, 113, 127, 143, 159, 173, 187, 201, 215, 231, 245, 259, 285, 364, 374, 384, 394, 404, 414, 424, 434, 444, 454, and 485, or a sequence at least at or about 90%, 91%, 92%, 93%, 94%, 95%, 96%, 97%, 98%, or 99% identical with such a sequence.

[0098] In some instances, the Vβ or Vδ region contains a CDR-1 comprising an amino acid sequence set forth in SEQ ID NO: 9, or a sequence having at least at or about 90%, 91%, 92%, 93%, 94%, 95%, 96%, 97%, 98%, or 99% identity with such a sequence. In some aspects, the Vβ or Vδ region contains a CDR-1 contained within the amino acid sequence set forth in any of SEQ ID NOs: 12, 28, 44, 58, 85, 99, 113, 127, 143, 159, 173, 187, 201, 215, 231, 245, 259, 285, 364, 374, 384, 394, 404, 414, 424, 434, 444, 454, and 485, or a sequence having at least at or about 90%, 91%, 92%, 93%, 94%, 95%, 96%, 97%, 98%, or 99% identity with such a sequence. In some embodiments, the Vβ or Vδ region contains a CDR-2 comprising an amino acid sequence set forth in SEQ ID NO: 10, or a sequence having at least at or about 90%, 91%, 92%, 93%, 94%, 95%, 96%, 97%, 98%, or 99% identity with such a sequence. In some embodiments, the Vβ or Vδ region contains a CDR-2 contained within the amino acid sequence set forth in any of SEQ ID NOs: 12, 28, 44, 58, 85, 99, 113, 127, 143, 159, 173, 187, 201, 215, 231, 245, 259, 285, 364, 374, 384, 394, 404, 414, 424, 434, 444, 454, and 485, or a sequence having at least at or about 90%, 91%, 92%, 93%, 94%, 95%, 96%, 97%, 98%, or 99% identity with such a sequence.

[0099] In some embodiments, the Vα or Vγ region contains the amino acid sequence set forth in any of SEQ ID NOs: 4, 22, 38, 52, 66, 79, 93, 107, 121, 137, 153, 167, 181, 195, 209, 225, 239, 253, 269, 279, 360, 370, 380, 390, 400, 410, 420, 430, 440, 450, and 481, or a sequence that has at least 90%, 91%, 92%, 93%, 94%, 95%, 96%, 97%, 98%, or 99% sequence identity thereto. In some instances, the Vβ or Vδ region contains the amino acid sequence set forth in any of SEQ ID NOs: 12, 28, 44, 58, 85, 99, 113, 127, 143, 159, 173, 187, 201, 215, 231, 245, 259, 285, 364, 374, 384, 394, 404, 414, 424, 434, 444, 454, and 485, or a sequence that has at least 90%, 91%, 92%, 93%, 94%, 95%, 96%, 97%, 98%, or 99% sequence identity thereto. In some embodiments, the TCR contains an alpha chain comprising any of such Vα or Vγ region sequences and any of such Vβ or Vδ region sequences.

[0100] In one embodiment, a TCR or antigen binding fragment thereof provided herein having the ability to bind to a peptide epitope of a minor histocompatibility antigen HA-1 in the context of an MHC molecule can include an alpha chain (or gamma chain) having a CDR-1 having the amino acid sequence set forth in SEQ ID NO:1 (or a variant of SEQ ID NO:1 with one or two amino acid modifications), a CDR-2 having the amino acid sequence set forth in SEQ ID NO:2 (or a variant of SEQ ID NO:2 with one or two amino acid modifications), and a CDR-3 having the amino acid sequence set forth in SEQ ID NO:3 (or a variant of SEQ ID NO:3 with one or two amino acid modifications) and a beta chain (or delta chain) having a CDR-1 having the amino acid sequence set forth in SEQ ID NO:9 (or a variant of SEQ ID NO:9 with one or two amino acid modifications), a CDR-2 having the amino acid sequence set forth in SEQ ID NO: 10 (or a variant of SEQ ID NO:10 with one or two amino acid modifications), and a CDR-3 having the amino acid sequence set forth in SEQ ID NO:11 (or a variant of SEQ ID NO:11 with one or two amino acid modifications). An example of such a TCR having these CDRs and the ability to bind to a peptide epitope of a minor histocompatibility antigen HA-1 in the context of an MHC molecule includes, without limitation, TCR A.

[0101] In some cases, a TCR or antigen binding fragment thereof provided herein having the ability to bind to a peptide epitope of a minor histocompatibility antigen HA-1 in the context of an MHC molecule and having an alpha chain (or gamma chain) having a CDR-1 having the amino acid sequence set forth in SEQ ID NO:1 (or a variant of SEQ ID NO:1 with one or two amino acid modifications), a CDR-2 having the amino acid sequence set forth in SEQ ID NO:2 (or a variant of SEQ ID NO:2 with one or two amino acid modifications), and a CDR-3 having the amino acid sequence set forth in SEQ ID NO:3 (or a variant of SEQ ID NO:3 with one or two amino acid modifications) and a beta chain (or delta chain) having a CDR-1 having the amino acid sequence set forth in SEQ ID NO:9 (or a variant of SEQ ID NO:9 with one or two amino acid modifications), a CDR-2 having the amino acid sequence set forth in SEQ ID NO:10 (or a variant of SEQ ID NO:10 with one or two amino acid modifications), and a CDR-3 having the amino acid sequence set forth in SEQ ID NO: 11 (or a variant of SEQ ID NO: 11 with one or two amino acid modifications) can include any appropriate framework regions. For example, such a TCR or antigen binding fragment thereof can include an alpha chain that includes a framework region 1 having the entire amino acid sequence set forth in SEQ ID NO:4 that is upstream of the amino acid sequence of SEQ ID NO: 1 (or a variant of that sequence with one, two, three, four, five, six, seven, eight, nine, ten, or more amino acid modifications), a framework region 2 having the entire amino acid sequence set forth in SEQ ID NO:4 that is between the amino acid sequences of SEQ ID NOs: 1 and 2 (or a variant of that sequence with one, two, three, four, five, six, seven, eight, nine, ten, or more amino acid modifications), a framework region 3 having the entire amino acid sequence set forth in SEQ ID NO:4 that is between the amino acid sequences of SEQ ID NOs:2 and 3 (or a variant of that sequence with one, two, three, four, five, six, seven, eight, nine, ten, or more amino acid modifications), and a framework region 4 having the entire amino acid sequence set forth in SEQ ID NO:4 that is downstream of the amino acid sequence of SEQ ID NO:3 (or a variant of that sequence with one, two, three, four, five, six, seven, eight, nine, ten, or more amino acid modifications) and a beta chain that includes a framework region 1 having the entire amino acid sequence set forth in SEQ ID NO: 12 that is upstream of the amino acid sequence of SEQ ID NO:9 (or a variant of that sequence with one, two, three, four, five, six, seven, eight, nine, ten, or more amino acid modifications), a framework region 2 having the entire amino acid sequence set forth in SEQ ID NO: 12 that is between the amino acid sequences of SEQ ID NOs:9 and 10 (or a variant of that sequence with one, two, three, four, five, six, seven, eight, nine, ten, or more amino acid modifications), a framework region 3 having the entire amino acid sequence set forth in SEQ ID NO:12 that is between the amino acid sequences of SEQ ID NOs:10 and 11 (or a variant of that sequence with one, two, three, four, five, six, seven, eight, nine, ten, or more amino acid modifications), and a framework region 4 having the entire amino acid sequence set forth in SEQ ID NO: 12 that is downstream of the amino acid sequence of SEQ ID NO: 11 (or a variant of that sequence with one, two, three, four, five, six, seven, eight, nine, ten, or more amino acid modifications).

[0102] In some cases, a TCR or antigen binding fragment thereof provided herein having the ability to bind to a peptide epitope of a minor histocompatibility antigen HA-1 in the context of an MHC molecule can include an alpha chain that includes an amino acid sequence having at least 90 percent identity to the amino acid sequence set forth in SEQ ID NO:4 and a beta chain that includes an amino acid sequence having at least 90 percent identity to the amino acid sequence set forth in SEQ ID NO: 12. For example, a TCR or antigen binding fragment thereof provided herein can include an alpha chain that includes an amino acid sequence having at least 90, 91, 92, 93, 94, 95, 96, 97, 98, or 99 percent identity to the amino acid sequence set forth in SEQ ID NO:4 and a beta chain that includes an amino acid sequence having at least 90, 91, 92, 93, 94, 95, 96, 97, 98, or 99 percent identity to the amino acid sequence set forth in SEQ ID NO:12. In some cases, a TCR or antigen binding fragment thereof provided herein can include (a) an alpha chain that includes an amino acid sequence having 100 percent identity to the amino acid sequence set forth in SEQ ID NO:4, and (b) a beta chain that includes an amino acid sequence having 100 percent identity to the amino acid sequence set forth in SEQ ID NO:12.

[0103] In some cases, a TCR or antigen binding fragment thereof provided herein having the ability to bind to a peptide epitope of a minor histocompatibility antigen HA-1 in the context of an MHC molecule can include (a) an alpha chain that includes an amino acid sequence having at least 90 percent identity to the amino acid sequence set forth in SEQ ID NO:4, provided that the alpha chain includes the amino acid sequences set forth in SEQ ID NOs: 1, 2, and 3 and (b) a beta chain that includes an amino acid sequence having at least 90 percent identity to the amino acid sequence set forth in SEQ ID NO: 12, provided that the beta chain includes the amino acid sequences set forth in SEQ ID NOs:9, 10, and 11. For example, a TCR or antigen binding fragment thereof provided herein can include (a) an alpha chain that includes an amino acid sequence having at least 90, 91, 92, 93, 94, 95, 96, 97, 98, or 99 percent identity to the amino acid sequence set forth in SEQ ID NO:4, provided that the alpha chain includes the amino acid sequences set forth in SEQ ID NOs: 1, 2, and 3 and (b) a beta chain that includes an amino acid sequence having at least 90, 91, 92, 93, 94, 95, 96, 97, 98, or 99 percent identity to the amino acid sequence set forth in SEQ ID NO:12, provided that the beta chain includes the amino acid sequences set forth in SEQ ID NOs:9, 10, and 11.

[0104] In some cases, a TCR or antigen binding fragment thereof provided herein having the ability to bind to a peptide epitope of a minor histocompatibility antigen HA-1 in the context of an MHC molecule can include (a) an alpha chain having the amino acid sequence set forth in SEQ ID NO:4 or the amino acid set forth in SEQ ID NO:4 with one, two, three, four, five, six, seven, eight, nine, or 10 amino acid modifications (e.g., amino acid substitutions, amino acid deletions, and/or amino acid additions) and (b) a beta chain having the amino acid sequence set forth in SEQ ID NO: 12 or the amino acid set forth in SEQ ID NO: 12 with one, two, three, four, five, six, seven, eight, nine, or 10 amino acid modifications (e.g., amino acid substitutions, amino acid deletions, and/or amino acid additions). For example, a TCR or antigen binding fragment thereof provided herein (a) can have the ability to bind to a peptide epitope of a minor histocompatibility antigen HA-1 in the context of an MHC molecule, (b) can include an alpha chain having the amino acid sequence set forth in SEQ ID NO:4 with one, two, three, four, five, six, seven, eight, nine, or 10 amino acid modifications (e.g., amino acid substitutions, amino acid deletions, and/or amino acid additions), provided that the alpha chain includes the amino acid sequences set forth in SEQ ID NOs: 1, 2, and 3, and (c) can include a beta chain having the amino acid sequence set forth in SEQ ID NO: 12 with one, two, three, four, five, six, seven, eight, nine, or 10 amino acid modifications (e.g., amino acid substitutions, amino acid deletions, and/or amino acid additions), provided that the beta chain includes the amino acid sequences set forth in SEQ ID NOs:9, 10, and 11.

[0105] In one embodiment, a TCR or antigen binding fragment thereof provided herein having the ability to bind to a peptide epitope of a minor histocompatibility antigen HA-1 in the context of an MHC molecule can include an alpha chain (or gamma chain) having a CDR-1 having the amino acid sequence set forth in SEQ ID NO: 19 (or a variant of SEQ ID NO: 19 with one or two amino acid modifications), a CDR-2 having the amino acid sequence set forth in SEQ ID NO:20 (or a variant of SEQ ID NO:20 with one or two amino acid modifications), and a CDR-3 having the amino acid sequence set forth in SEQ ID NO:21 (or a variant of SEQ ID NO:21 with one or two amino acid modifications) and a beta chain (or delta chain) having a CDR-1 having the amino acid sequence set forth in SEQ ID NO:9 (or a variant of SEQ ID NO:9 with one or two amino acid modifications), a CDR-2 having the amino acid sequence set forth in SEQ ID NO: 10 (or a variant of SEQ ID NO:10 with one or two amino acid modifications), and a CDR-3 having the amino acid sequence set forth in SEQ ID NO:27 (or a variant of SEQ ID NO:27 with one or two amino acid modifications). An example of such a TCR having these CDRs and the ability to bind to a peptide epitope of a minor histocompatibility antigen HA-1 in the context of an MHC molecule includes, without limitation, TCR B.

[0106] In some cases, a TCR or antigen binding fragment thereof provided herein having the ability to bind to a peptide epitope of a minor histocompatibility antigen HA-1 in the context of an MHC molecule and having an alpha chain (or gamma chain) having a CDR-1 having the amino acid sequence set forth in SEQ ID NO:19 (or a variant of SEQ ID NO:19 with one or two amino acid modifications), a CDR-2 having the amino acid sequence set forth in SEQ ID NO:20 (or a variant of SEQ ID NO:20 with one or two amino acid modifications), and a CDR-3 having the amino acid sequence set forth in SEQ ID NO:21 (or a variant of SEQ ID NO:21 with one or two amino acid modifications) and a beta chain (or delta chain) having a CDR-1 having the amino acid sequence set forth in SEQ ID NO:9 (or a variant of SEQ ID NO:9 with one or two amino acid modifications), a CDR-2 having the amino acid sequence set forth in SEQ ID NO:10 (or a variant of SEQ ID NO:10 with one or two amino acid modifications), and a CDR-3 having the amino acid sequence set forth in SEQ ID NO:27 (or a variant of SEQ ID NO:27 with one or two amino acid modifications) can include any appropriate framework regions. For example, such a TCR or antigen binding fragment thereof can include an alpha chain that includes a framework region 1 having the entire amino acid sequence set forth in SEQ ID NO:22 that is upstream of the amino acid sequence of SEQ ID NO: 19 (or a variant of that sequence with one, two, three, four, five, six, seven, eight, nine, ten, or more amino acid modifications), a framework region 2 having the entire amino acid sequence set forth in SEQ ID NO:22 that is between the amino acid sequences of SEQ ID NOs:19 and 20 (or a variant of that sequence with one, two, three, four, five, six, seven, eight, nine, ten, or more amino acid modifications), a framework region 3 having the entire amino acid sequence set forth in SEQ ID NO:22 that is between the amino acid sequences of SEQ ID NOs:20 and 21 (or a variant of that sequence with one, two, three, four, five, six, seven, eight, nine, ten, or more amino acid modifications), and a framework region 4 having the entire amino acid sequence set forth in SEQ ID NO:22 that is downstream of the amino acid sequence of SEQ ID NO:21 (or a variant of that sequence with one, two, three, four, five, six, seven, eight, nine, ten, or more amino acid modifications) and a beta chain that includes a framework region 1 having the entire amino acid sequence set forth in SEQ ID NO:28 that is upstream of the amino acid sequence of SEQ ID NO:9 (or a variant of that sequence with one, two, three, four, five, six, seven, eight, nine, ten, or more amino acid modifications), a framework region 2 having the entire amino acid sequence set forth in SEQ ID NO:28 that is between the amino acid sequences of SEQ ID NOs:9 and 10 (or a variant of that sequence with one, two, three, four, five, six, seven, eight, nine, ten, or more amino acid modifications), a framework region 3 having the entire amino acid sequence set forth in SEQ ID NO:28 that is between the amino acid sequences of SEQ ID NOs: 10 and 27 (or a variant of that sequence with one, two, three, four, five, six, seven, eight, nine, ten, or more amino acid modifications), and a framework region 4 having the entire amino acid sequence set forth in SEQ ID NO:28 that is downstream of the amino acid sequence of SEQ ID NO:27 (or a variant of that sequence with one, two, three, four, five, six, seven, eight, nine, ten, or more amino acid modifications).

[0107] In some cases, a TCR or antigen binding fragment thereof provided herein having the ability to bind to a peptide epitope of a minor histocompatibility antigen HA-1 in the context of an MHC molecule can include an alpha chain that includes an amino acid sequence having at least 90 percent identity to the amino acid sequence set forth in SEQ ID NO:22 and a beta chain that includes an amino acid sequence having at least 90 percent identity to the amino acid sequence set forth in SEQ ID NO:28. For example, a TCR or antigen binding fragment thereof provided herein can include an alpha chain that includes an amino acid sequence having at least 90, 91, 92, 93, 94, 95, 96, 97, 98, or 99 percent identity to the amino acid sequence set forth in SEQ ID NO:22 and a beta chain that includes an amino acid sequence having at least 90, 91, 92, 93, 94, 95, 96, 97, 98, or 99 percent identity to the amino acid sequence set forth in SEQ ID NO:28. In some cases, a TCR or antigen binding fragment thereof provided herein can include (a) an alpha chain that includes an amino acid sequence having 100 percent identity to the amino acid sequence set forth in SEQ ID NO:22, and (b) a beta chain that includes an amino acid sequence having 100 percent identity to the amino acid sequence set forth in SEQ ID NO:28.

[0108] In some cases, a TCR or antigen binding fragment thereof provided herein having the ability to bind to a peptide epitope of a minor histocompatibility antigen HA-1 in the context of an MHC molecule can include (a) an alpha chain that includes an amino acid sequence having at least 90 percent identity to the amino acid sequence set forth in SEQ ID NO:22, provided that the alpha chain includes the amino acid sequences set forth in SEQ ID NOs: 19, 20, and 21 and (b) a beta chain that includes an amino acid sequence having at least 90 percent identity to the amino acid sequence set forth in SEQ ID NO:28, provided that the beta chain includes the amino acid sequences set forth in SEQ ID NOs:9, 10, and 27. For example, a TCR or antigen binding fragment thereof provided herein can include (a) an alpha chain that includes an amino acid sequence having at least 90, 91, 92, 93, 94, 95, 96, 97, 98, or 99 percent identity to the amino acid sequence set forth in SEQ ID NO:22, provided that the alpha chain includes the amino acid sequences set forth in SEQ ID NOs: 19, 20, and 21 and (b) a beta chain that includes an amino acid sequence having at least 90, 91, 92, 93, 94, 95, 96, 97, 98, or 99 percent identity to the amino acid sequence set forth in SEQ ID NO:28, provided that the beta chain includes the amino acid sequences set forth in SEQ ID NOs:9, 10, and 27.

[0109] In some cases, a TCR or antigen binding fragment thereof provided herein having the ability to bind to a peptide epitope of a minor histocompatibility antigen HA-1 in the context of an MHC molecule can include (a) an alpha chain having the amino acid sequence set forth in SEQ ID NO:22 or the amino acid set forth in SEQ ID NO:22 with one, two, three, four, five, six, seven, eight, nine, or 10 amino acid modifications (e.g., amino acid substitutions, amino acid deletions, and/or amino acid additions) and (b) a beta chain having the amino acid sequence set forth in SEQ ID NO:28 or the amino acid set forth in SEQ ID NO:28 with one, two, three, four, five, six, seven, eight, nine, or 10 amino acid modifications (e.g., amino acid substitutions, amino acid deletions, and/or amino acid additions). For example, a TCR or antigen binding fragment thereof provided herein (a) can have the ability to bind to a peptide epitope of a minor histocompatibility antigen HA-1 in the context of an MHC molecule, (b) can include an alpha chain having the amino acid sequence set forth in SEQ ID NO:22 with one, two, three, four, five, six, seven, eight, nine, or 10 amino acid modifications (e.g., amino acid substitutions, amino acid deletions, and/or amino acid additions), provided that the alpha chain includes the amino acid sequences set forth in SEQ ID NOs: 19, 20, and 21, and (c) can include a beta chain having the amino acid sequence set forth in SEQ ID NO:28 with one, two, three, four, five, six, seven, eight, nine, or 10 amino acid modifications (e.g., amino acid substitutions, amino acid deletions, and/or amino acid additions), provided that the beta chain includes the amino acid sequences set forth in SEQ ID NOs:9, 10, and 27.

[0110] In one embodiment, a TCR or antigen binding fragment thereof provided herein having the ability to bind to a peptide epitope of a minor histocompatibility antigen HA-1 in the context of an MHC molecule can include an alpha chain (or gamma chain) having a CDR-1 having the amino acid sequence set forth in SEQ ID NO:35 (or a variant of SEQ ID NO:35 with one or two amino acid modifications), a CDR-2 having the amino acid sequence set forth in SEQ ID NO:36 (or a variant of SEQ ID NO:36 with one or two amino acid modifications), and a CDR-3 having the amino acid sequence set forth in SEQ ID NO:37 (or a variant of SEQ ID NO:37 with one or two amino acid modifications) and a beta chain (or delta chain) having a CDR-1 having the amino acid sequence set forth in SEQ ID NO:9 (or a variant of SEQ ID NO:9 with one or two amino acid modifications), a CDR-2 having the amino acid sequence set forth in SEQ ID NO: 10 (or a variant of SEQ ID NO:10 with one or two amino acid modifications), and a CDR-3 having the amino acid sequence set forth in SEQ ID NO:43 (or a variant of SEQ ID NO:43 with one or two amino acid modifications). An example of such a TCR having these CDRs and the ability to bind to a peptide epitope of a minor histocompatibility antigen HA-1 in the context of an MHC molecule includes, without limitation, TCR C.

[0111] In some cases, a TCR or antigen binding fragment thereof provided herein having the ability to bind to a peptide epitope of a minor histocompatibility antigen HA-1 in the context of an MHC molecule and having an alpha chain (or gamma chain) having a CDR-1 having the amino acid sequence set forth in SEQ ID NO:35 (or a variant of SEQ ID NO:35 with one or two amino acid modifications), a CDR-2 having the amino acid sequence set forth in SEQ ID NO:36 (or a variant of SEQ ID NO:36 with one or two amino acid modifications), and a CDR-3 having the amino acid sequence set forth in SEQ ID NO:37 (or a variant of SEQ ID NO:37 with one or two amino acid modifications) and a beta chain (or delta chain) having a CDR-1 having the amino acid sequence set forth in SEQ ID NO:9 (or a variant of SEQ ID NO:9 with one or two amino acid modifications), a CDR-2 having the amino acid sequence set forth in SEQ ID NO:10 (or a variant of SEQ ID NO:10 with one or two amino acid modifications), and a CDR-3 having the amino acid sequence set forth in SEQ ID NO:43 (or a variant of SEQ ID NO:43 with one or two amino acid modifications) can include any appropriate framework regions. For example, such a TCR or antigen binding fragment thereof can include an alpha chain that includes a framework region 1 having the entire amino acid sequence set forth in SEQ ID NO:38 that is upstream of the amino acid sequence of SEQ ID NO:35 (or a variant of that sequence with one, two, three, four, five, six, seven, eight, nine, ten, or more amino acid modifications), a framework region 2 having the entire amino acid sequence set forth in SEQ ID NO:38 that is between the amino acid sequences of SEQ ID NOs:35 and 36 (or a variant of that sequence with one, two, three, four, five, six, seven, eight, nine, ten, or more amino acid modifications), a framework region 3 having the entire amino acid sequence set forth in SEQ ID NO:38 that is between the amino acid sequences of SEQ ID NOs:36 and 37 (or a variant of that sequence with one, two, three, four, five, six, seven, eight, nine, ten, or more amino acid modifications), and a framework region 4 having the entire amino acid sequence set forth in SEQ ID NO:38 that is downstream of the amino acid sequence of SEQ ID NO:37 (or a variant of that sequence with one, two, three, four, five, six, seven, eight, nine, ten, or more amino acid modifications) and a beta chain that includes a framework region 1 having the entire amino acid sequence set forth in SEQ ID NO:44 that is upstream of the amino acid sequence of SEQ ID NO:9 (or a variant of that sequence with one, two, three, four, five, six, seven, eight, nine, ten, or more amino acid modifications), a framework region 2 having the entire amino acid sequence set forth in SEQ ID NO:44 that is between the amino acid sequences of SEQ ID NOs:9 and 10 (or a variant of that sequence with one, two, three, four, five, six, seven, eight, nine, ten, or more amino acid modifications), a framework region 3 having the entire amino acid sequence set forth in SEQ ID NO:44 that is between the amino acid sequences of SEQ ID NOs: 10 and 43 (or a variant of that sequence with one, two, three, four, five, six, seven, eight, nine, ten, or more amino acid modifications), and a framework region 4 having the entire amino acid sequence set forth in SEQ ID NO:44 that is downstream of the amino acid sequence of SEQ ID NO:43 (or a variant of that sequence with one, two, three, four, five, six, seven, eight, nine, ten, or more amino acid modifications).

[0112] In some cases, a TCR or antigen binding fragment thereof provided herein having the ability to bind to a peptide epitope of a minor histocompatibility antigen HA-1 in the context of an MHC molecule can include an alpha chain that includes an amino acid sequence having at least 90 percent identity to the amino acid sequence set forth in SEQ ID NO:38 and a beta chain that includes an amino acid sequence having at least 90 percent identity to the amino acid sequence set forth in SEQ ID NO:44. For example, a TCR or antigen binding fragment thereof provided herein can include an alpha chain that includes an amino acid sequence having at least 90, 91, 92, 93, 94, 95, 96, 97, 98, or 99 percent identity to the amino acid sequence set forth in SEQ ID NO:38 and a beta chain that includes an amino acid sequence having at least 90, 91, 92, 93, 94, 95, 96, 97, 98, or 99 percent identity to the amino acid sequence set forth in SEQ ID NO:44. In some cases, a TCR or antigen binding fragment thereof provided herein can include (a) an alpha chain that includes an amino acid sequence having 100 percent identity to the amino acid sequence set forth in SEQ ID NO:38, and (b) a beta chain that includes an amino acid sequence having 100 percent identity to the amino acid sequence set forth in SEQ ID NO:44.

[0113] In some cases, a TCR or antigen binding fragment thereof provided herein having the ability to bind to a peptide epitope of a minor histocompatibility antigen HA-1 in the context of an MHC molecule can include (a) an alpha chain that includes an amino acid sequence having at least 90 percent identity to the amino acid sequence set forth in SEQ ID NO:38, provided that the alpha chain includes the amino acid sequences set forth in SEQ ID NOs:35, 36, and 37 and (b) a beta chain that includes an amino acid sequence having at least 90 percent identity to the amino acid sequence set forth in SEQ ID NO:44, provided that the beta chain includes the amino acid sequences set forth in SEQ ID NOs:9, 10, and 43. For example, a TCR or antigen binding fragment thereof provided herein can include (a) an alpha chain that includes an amino acid sequence having at least 90, 91, 92, 93, 94, 95, 96, 97, 98, or 99 percent identity to the amino acid sequence set forth in SEQ ID NO:38, provided that the alpha chain includes the amino acid sequences set forth in SEQ ID NOs: 35, 36, and 37 and (b) a beta chain that includes an amino acid sequence having at least 90, 91, 92, 93, 94, 95, 96, 97, 98, or 99 percent identity to the amino acid sequence set forth in SEQ ID NO:44, provided that the beta chain includes the amino acid sequences set forth in SEQ ID NOs:9, 10, and 43.

[0114] In some cases, a TCR or antigen binding fragment thereof provided herein having the ability to bind to a peptide epitope of a minor histocompatibility antigen HA-1 in the context of an MHC molecule can include (a) an alpha chain having the amino acid sequence set forth in SEQ ID NO:38 or the amino acid set forth in SEQ ID NO:38 with one, two, three, four, five, six, seven, eight, nine, or 10 amino acid modifications (e.g., amino acid substitutions, amino acid deletions, and/or amino acid additions) and (b) a beta chain having the amino acid sequence set forth in SEQ ID NO:44 or the amino acid set forth in SEQ ID NO:44 with one, two, three, four, five, six, seven, eight, nine, or 10 amino acid modifications (e.g., amino acid substitutions, amino acid deletions, and/or amino acid additions). For example, a TCR or antigen binding fragment thereof provided herein (a) can have the ability to bind to a peptide epitope of a minor histocompatibility antigen HA-1 in the context of an MHC molecule, (b) can include an alpha chain having the amino acid sequence set forth in SEQ ID NO:38 with one, two, three, four, five, six, seven, eight, nine, or 10 amino acid modifications (e.g., amino acid substitutions, amino acid deletions, and/or amino acid additions), provided that the alpha chain includes the amino acid sequences set forth in SEQ ID NOs: 35, 36, and 37, and (c) can include a beta chain having the amino acid sequence set forth in SEQ ID NO:44 with one, two, three, four, five, six, seven, eight, nine, or 10 amino acid modifications (e.g., amino acid substitutions, amino acid deletions, and/or amino acid additions), provided that the beta chain includes the amino acid sequences set forth in SEQ ID NOs:9, 10, and 43.

[0115] In one embodiment, a TCR or antigen binding fragment thereof provided herein having the ability to bind to a peptide epitope of a minor histocompatibility antigen HA-1 in the context of an MHC molecule can include an alpha chain (or gamma chain) having a CDR-1 having the amino acid sequence set forth in SEQ ID NO: 1 (or a variant of SEQ ID NO: 1 with one or two amino acid modifications), a CDR-2 having the amino acid sequence set forth in SEQ ID NO:2 (or a variant of SEQ ID NO:2 with one or two amino acid modifications), and a CDR-3 having the amino acid sequence set forth in SEQ ID NO:51 (or a variant of SEQ ID NO:51 with one or two amino acid modifications) and a beta chain (or delta chain) having a CDR-1 having the amino acid sequence set forth in SEQ ID NO:9 (or a variant of SEQ ID NO:9 with one or two amino acid modifications), a CDR-2 having the amino acid sequence set forth in SEQ ID NO: 10 (or a variant of SEQ ID NO:10 with one or two amino acid modifications), and a CDR-3 having the amino acid sequence set forth in SEQ ID NO:57 (or a variant of SEQ ID NO:57 with one or two amino acid modifications). An example of such a TCR having these CDRs and the ability to bind to a peptide epitope of a minor histocompatibility antigen HA-1 in the context of an MHC molecule includes, without limitation, TCR D.

[0116] In some cases, a TCR or antigen binding fragment thereof provided herein having the ability to bind to a peptide epitope of a minor histocompatibility antigen HA-1 in the context of an MHC molecule and having an alpha chain (or gamma chain) having a CDR-1 having the amino acid sequence set forth in SEQ ID NO:1 (or a variant of SEQ ID NO:1 with one or two amino acid modifications), a CDR-2 having the amino acid sequence set forth in SEQ ID NO:2 (or a variant of SEQ ID NO:2 with one or two amino acid modifications), and a CDR-3 having the amino acid sequence set forth in SEQ ID NO:51 (or a variant of SEQ ID NO:51 with one or two amino acid modifications) and a beta chain (or delta chain) having a CDR-1 having the amino acid sequence set forth in SEQ ID NO:9 (or a variant of SEQ ID NO:9 with one or two amino acid modifications), a CDR-2 having the amino acid sequence set forth in SEQ ID NO: 10 (or a variant of SEQ ID NO:10 with one or two amino acid modifications), and a CDR-3 having the amino acid sequence set forth in SEQ ID NO:57 (or a variant of SEQ ID NO:57 with one or two amino acid modifications) can include any appropriate framework regions. For example, such a TCR or antigen binding fragment thereof can include an alpha chain that includes a framework region 1 having the entire amino acid sequence set forth in SEQ ID NO:52 that is upstream of the amino acid sequence of SEQ ID NO: 1 (or a variant of that sequence with one, two, three, four, five, six, seven, eight, nine, ten, or more amino acid modifications), a framework region 2 having the entire amino acid sequence set forth in SEQ ID NO:52 that is between the amino acid sequences of SEQ ID NOs: 1 and 2 (or a variant of that sequence with one, two, three, four, five, six, seven, eight, nine, ten, or more amino acid modifications), a framework region 3 having the entire amino acid sequence set forth in SEQ ID NO:52 that is between the amino acid sequences of SEQ ID NOs:2 and 51 (or a variant of that sequence with one, two, three, four, five, six, seven, eight, nine, ten, or more amino acid modifications), and a framework region 4 having the entire amino acid sequence set forth in SEQ ID NO:52 that is downstream of the amino acid sequence of SEQ ID NO:51 (or a variant of that sequence with one, two, three, four, five, six, seven, eight, nine, ten, or more amino acid modifications) and a beta chain that includes a framework region 1 having the entire amino acid sequence set forth in SEQ ID NO:58 that is upstream of the amino acid sequence of SEQ ID NO:9 (or a variant of that sequence with one, two, three, four, five, six, seven, eight, nine, ten, or more amino acid modifications), a framework region 2 having the entire amino acid sequence set forth in SEQ ID NO:58 that is between the amino acid sequences of SEQ ID NOs:9 and 10 (or a variant of that sequence with one, two, three, four, five, six, seven, eight, nine, ten, or more amino acid modifications), a framework region 3 having the entire amino acid sequence set forth in SEQ ID NO:58 that is between the amino acid sequences of SEQ ID NOs: 10 and 57 (or a variant of that sequence with one, two, three, four, five, six, seven, eight, nine, ten, or more amino acid modifications), and a framework region 4 having the entire amino acid sequence set forth in SEQ ID NO:58 that is downstream of the amino acid sequence of SEQ ID NO:57 (or a variant of that sequence with one, two, three, four, five, six, seven, eight, nine, ten, or more amino acid modifications).

[0117] In some cases, a TCR or antigen binding fragment thereof provided herein having the ability to bind to a peptide epitope of a minor histocompatibility antigen HA-1 in the context of an MHC molecule can include an alpha chain that includes an amino acid sequence having at least 90 percent identity to the amino acid sequence set forth in SEQ ID NO:52 and a beta chain that includes an amino acid sequence having at least 90 percent identity to the amino acid sequence set forth in SEQ ID NO:58. For example, a TCR or antigen binding fragment thereof provided herein can include an alpha chain that includes an amino acid sequence having at least 90, 91, 92, 93, 94, 95, 96, 97, 98, or 99 percent identity to the amino acid sequence set forth in SEQ ID NO:52 and a beta chain that includes an amino acid sequence having at least 90, 91, 92, 93, 94, 95, 96, 97, 98, or 99 percent identity to the amino acid sequence set forth in SEQ ID NO:58. In some cases, a TCR or antigen binding fragment thereof provided herein can include (a) an alpha chain that includes an amino acid sequence having 100 percent identity to the amino acid sequence set forth in SEQ ID NO:52, and (b) a beta chain that includes an amino acid sequence having 100 percent identity to the amino acid sequence set forth in SEQ ID NO:58.

[0118] In some cases, a TCR or antigen binding fragment thereof provided herein having the ability to bind to a peptide epitope of a minor histocompatibility antigen HA-1 in the context of an MHC molecule can include (a) an alpha chain that includes an amino acid sequence having at least 90 percent identity to the amino acid sequence set forth in SEQ ID NO:52, provided that the alpha chain includes the amino acid sequences set forth in SEQ ID NOs:1, 2, and 51 and (b) a beta chain that includes an amino acid sequence having at least 90 percent identity to the amino acid sequence set forth in SEQ ID NO:58, provided that the beta chain includes the amino acid sequences set forth in SEQ ID NOs:9, 10, and 57. For example, a TCR or antigen binding fragment thereof provided herein can include (a) an alpha chain that includes an amino acid sequence having at least 90, 91, 92, 93, 94, 95, 96, 97, 98, or 99 percent identity to the amino acid sequence set forth in SEQ ID NO:52, provided that the alpha chain includes the amino acid sequences set forth in SEQ ID NOs: 1, 2, and 51 and (b) a beta chain that includes an amino acid sequence having at least 90, 91, 92, 93, 94, 95, 96, 97, 98, or 99 percent identity to the amino acid sequence set forth in SEQ ID NO:58, provided that the beta chain includes the amino acid sequences set forth in SEQ ID NOs:9, 10, and 57.

[0119] In some cases, a TCR or antigen binding fragment thereof provided herein having the ability to bind to a peptide epitope of a minor histocompatibility antigen HA-1 in the context of an MHC molecule can include (a) an alpha chain having the amino acid sequence set forth in SEQ ID NO:52 or the amino acid set forth in SEQ ID NO:52 with one, two, three, four, five, six, seven, eight, nine, or 10 amino acid modifications (e.g., amino acid substitutions, amino acid deletions, and/or amino acid additions) and (b) a beta chain having the amino acid sequence set forth in SEQ ID NO:58 or the amino acid set forth in SEQ ID NO:58 with one, two, three, four, five, six, seven, eight, nine, or 10 amino acid modifications (e.g., amino acid substitutions, amino acid deletions, and/or amino acid additions). For example, a TCR or antigen binding fragment thereof provided herein (a) can have the ability to bind to a peptide epitope of a minor histocompatibility antigen HA-1 in the context of an MHC molecule, (b) can include an alpha chain having the amino acid sequence set forth in SEQ ID NO:52 with one, two, three, four, five, six, seven, eight, nine, or 10 amino acid modifications (e.g., amino acid substitutions, amino acid deletions, and/or amino acid additions), provided that the alpha chain includes the amino acid sequences set forth in SEQ ID NOs: 1, 2, and 51, and (c) can include a beta chain having the amino acid sequence set forth in SEQ ID NO:58 with one, two, three, four, five, six, seven, eight, nine, or 10 amino acid modifications (e.g., amino acid substitutions, amino acid deletions, and/or amino acid additions), provided that the beta chain includes the amino acid sequences set forth in SEQ ID NOs:9, 10, and 57.

[0120] In some embodiments, a TCR or antigen-binding fragment thereof provided herein contains a Vα or Vγ region that contains a CDR-1, a CDR-2, and a CDR-3, comprising the sequences of SEQ ID NOs: 1, 2, 3, respectively; a CDR-1, a CDR-2, and a CDR-3, comprising SEQ ID NOs: 19, 20, 21, respectively; a CDR-1, a CDR-2, and a CDR-3, comprising SEQ ID NOs:35, 36, 37, respectively; a CDR-1, a CDR-2, and a CDR-3, comprising SEQ ID NOs:1, 2, 51, respectively; a CDR-1, a CDR-2, and a CDR-3, comprising SEQ ID NOs:1, 2, 65, respectively; a CDR-1, a CDR-2, and a CDR-3, comprising SEQ ID NOs:76, 77, 78, respectively; a CDR-1, a CDR-2, and a CDR-3, comprising SEQ ID NOs: 19, 20, 92, respectively; a CDR-1, a CDR-2, and a CDR-3, comprising SEQ ID NOs:76, 77, 106, respectively; a CDR-1, a CDR-2, and a CDR-3, comprising SEQ ID NOs:35, 36, 120, respectively; a CDR-1, a CDR-2, and a CDR-3, comprising SEQ ID NOs:134, 135, 136, respectively; a CDR-1, a CDR-2, and a CDR-3, comprising SEQ ID NOs: 150, 151, 152, respectively; a CDR-1, a CDR-2, and a CDR-3, comprising SEQ ID NOs:35, 36, 166, respectively; a CDR-1, a CDR-2, and a CDR-3, comprising SEQ ID NOs:35, 36, 180, respectively; a CDR-1, a CDR-2, and a CDR-3, comprising SEQ ID NOs:76, 77, 194, respectively; a CDR-1, a CDR-2, and a CDR-3, comprising SEQ ID NOs:76, 77, 208, respectively; a CDR-1, a CDR-2, and a CDR-3, comprising SEQ ID NOs:222, 223, 224, respectively; a CDR-1, a CDR-2, and a CDR-3, comprising SEQ ID NOs:76, 77, 238, respectively; a CDR-1, a CDR-2, and a CDR-3, comprising SEQ ID NOs: 19, 20, 252, respectively; a CDR-1, a CDR-2, and a CDR-3, comprising SEQ ID NOs:266, 267, 268, respectively; or a CDR-1, a CDR-2, and a CDR-3, comprising SEQ ID NOs: 19, 20, 278, respectively. In some embodiments, a TCR or antigen-binding fragment thereof provided herein contains a Vβ or Vδ region that contains a CDR-1, CDR-2, and CDR-3 comprising the sequences of SEQ ID NOs:9, 10, 11, respectively; a CDR-1, a CDR-2, and a CDR-3, comprising SEQ ID NOs:9, 10, 27, respectively; a CDR-1, a CDR-2, and a CDR-3, comprising SEQ ID NOs:9, 10, 43, respectively; a CDR-1, a CDR-2, and a CDR-3, comprising SEQ ID NOs:9, 10, 57, respectively; a CDR-1, a CDR-2, and a CDR-3, comprising SEQ ID NOs:9, 10, 57, respectively; a CDR-1, a CDR-2, and a CDR-3, comprising SEQ ID NOs:9, 10, 84, respectively; a CDR-1, a CDR-2, and a CDR-3, comprising SEQ ID NOs:9, 10, 98, respectively; a CDR-1, a CDR-2, and a CDR-3, comprising SEQ ID NOs:9, 10, 112, respectively; a CDR-1, a CDR-2, and a CDR-3, comprising SEQ ID NOs:9, 10, 126, respectively; a CDR-1, a CDR-2, and a CDR-3, comprising SEQ ID NOs:9, 10, 142, respectively; a CDR-1, a CDR-2, and a CDR-3, comprising SEQ ID NOs:9, 10, 158, respectively; a CDR-1, a CDR-2, and a CDR-3, comprising SEQ ID NOs:9, 10, 172, respectively; a CDR-1, a CDR-2, and a CDR-3, comprising SEQ ID NOs:9, 10, 186, respectively; a CDR-1, a CDR-2, and a CDR-3, comprising SEQ ID NOs:9, 10, 200, respectively; a CDR-1, a CDR-2, and a CDR-3, comprising SEQ ID NOs:9, 10, 214, respectively; a CDR-1, a CDR-2, and a CDR-3, comprising SEQ ID NOs:9, 10, 230, respectively; a CDR-1, a CDR-2, and a CDR-3, comprising SEQ ID NOs:9, 10, 244, respectively; a CDR-1, a CDR-2, and a CDR-3, comprising SEQ ID NOs:9, 10, 258, respectively; a CDR-1, a CDR-2, and a CDR-3, comprising SEQ ID NOs:9, 10, 158, respectively; or a CDR-1, a CDR-2, and a CDR-3, comprising SEQ ID NOs:9, 10, 284, respectively. Also among the provided TCRs are those having sequences at least at or about 90%, 91%, 92%, 93%, 94%, 95%, 96%, 97%, 98%, or 99% identical to such sequences.

[0121] In some embodiments, a TCR or antigen-binding fragment thereof provided herein includes a Vα or Vγ region that contains a CDR-1, a CDR-2, and a CDR-3, comprising a CDR-1, a CDR-2, and a CDR-3 amino acid sequence, respectively, set forth in Table 1, such as in each row therein and a Vβ or Vδ region that contains a CDR-1, a CDR-2, and a CDR-3, comprising a CDR-1, a CDR-2, and a CDR-3 amino acid sequence, respectively, set forth in Table 1, such as in each row therein. In some embodiments, a TCR or antigen-binding fragment thereof provided herein includes a Vα or Vγ region that contains a CDR-1, a CDR-2, and a CDR-3, comprising a CDR-1, a CDR-2, and a CDR-3 amino acid sequence, respectively, contained within a Vα or Vγ region amino acid sequence set forth in Table 1, such as in each row therein, and a Vβ or Vδ region that contains a CDR-1, a CDR-2, and a CDR-3, comprising a CDR-1, a CDR-2, and a CDR-3 amino acid sequence, respectively, contained within a Vα or Vγ region amino acid sequence set forth in Table 1, such as in each row therein. Also among the provided TCRs are those containing sequences at least at or about 90%, 91%, 92%, 93%, 94%, 95%, 96%, 97%, 98%, or 99% identical to such sequences. Exemplary TCRs containing such CDRs, or their modified versions as described elsewhere herein, also are set forth in the Table 1, such as in each row therein.

TABLE 1
SEQ ID NOs of Amino Acid Sequences of CDRs
and Variable Regions of HA-1 Specific TCRs

| | Alpha variable | | | | Beta variable | | | |
|---|---|---|---|---|---|---|---|---|
| | Variable | | | | Variable | | | |
| TCR | Region | CDR-1 | CDR-2 | CDR-3 | Region | CDR-1 | CDR-2 | CDR-3 |
| TCR A | 4 | 1 | 2 | 3 | 12 | 9 | 10 | 11 |
| TCR B | 22 | 19 | 20 | 21 | 28 | 9 | 10 | 27 |
| TCR C | 38 | 35 | 36 | 37 | 44 | 9 | 10 | 43 |
| TCR D | 52 | 1 | 2 | 51 | 58 | 9 | 10 | 57 |
| TCR E | 66 | 1 | 2 | 65 | 58 | 9 | 10 | 57 |
| TCR F | 79 | 76 | 77 | 78 | 85 | 9 | 10 | 84 |
| TCR G | 93 | 19 | 20 | 92 | 99 | 9 | 10 | 98 |
| TCR H | 107 | 76 | 77 | 106 | 113 | 9 | 10 | 112 |
| TCR I | 121 | 35 | 36 | 120 | 127 | 9 | 10 | 126 |
| TCR J | 137 | 134 | 135 | 136 | 143 | 9 | 10 | 142 |
| TCR K | 153 | 150 | 151 | 152 | 159 | 9 | 10 | 158 |
| TCR L | 167 | 35 | 36 | 166 | 173 | 9 | 10 | 172 |
| TCR M | 181 | 35 | 36 | 180 | 187 | 9 | 10 | 186 |
| TCR N | 195 | 76 | 77 | 194 | 201 | 9 | 10 | 200 |
| TCR O | 209 | 76 | 77 | 208 | 215 | 9 | 10 | 214 |
| TCR P | 225 | 222 | 223 | 224 | 231 | 9 | 10 | 230 |
| TCR Q | 239 | 76 | 77 | 238 | 245 | 9 | 10 | 244 |
| TCR R | 253 | 19 | 20 | 252 | 259 | 9 | 10 | 258 |
| TCR S | 269 | 266 | 267 | 268 | 159 | 9 | 10 | 158 |
| TCR T | 279 | 19 | 20 | 278 | 285 | 9 | 10 | 284 |
| TCR U | 360 | a | b | 359 | 364 | 9 | 10 | 363 |
| TCR V | 370 | a | b | 369 | 374 | 9 | 10 | 373 |
| TCR W | 380 | a | b | 379 | 384 | 9 | 10 | 383 |
| TCR X | 390 | a | b | 389 | 394 | 9 | 10 | 393 |
| TCR Y | 400 | a | b | 399 | 404 | 9 | 10 | 403 |
| TCR Z | 410 | a | b | 409 | 414 | 9 | 10 | 413 |
| TCR AA | 420 | a | b | 419 | 424 | 9 | 10 | 423 |
| TCR AB | 430 | a | b | 429 | 434 | 9 | 10 | 433 |
| TCR AC | 440 | a | b | 439 | 444 | 9 | 10 | 443 |
| TCR AD | 450 | a | b | 449 | 454 | 9 | 10 | 453 |
| TCR AE | | a | b | 470 | | 9 | 10 | 57 |
| TCR AF | | a | b | 471 | | 9 | 10 | 57 |
| TCR AG | | a | b | 472 | | 9 | 10 | 57 |
| TCR AH | | a | b | 473 | | 9 | 10 | 57 |
| TCR AI | | a | b | 474 | | 9 | 10 | 475 |
| TCR AJ | 481 | a | b | 480 | 485 | 490 | 491 | 484 |

a can be any of the CDR1 Vα sequences shown in Table 1
b can be any of the CDR2 Vα sequences shown in Table 1

[0122] In some examples, a TCR or antigen binding fragment thereof provided herein can be designed to include an alpha chain (or gamma chain) that includes a set of three CDRs (e.g., a CDR-1, CDR-2, and CDR-3) as set forth in Table 1 (e.g., SEQ ID NOs: 1-3; SEQ ID NOs: 19-21; SEQ ID NOs:35-37; SEQ ID NOs:1, 2, and 51; SEQ ID NOs:1, 2, and 65; SEQ ID NOs: 76-78; SEQ ID NOs: 19, 20, and 92; SEQ ID NOs: 76, 77, and 106; SEQ ID NOs:35, 36, and 120; SEQ ID NOs:134-136; SEQ ID NOs:150-152; SEQ ID NOs:35, 36, and 166; SEQ ID NOs:35, 36, and 180; SEQ ID NOs: 76, 77, and 194; SEQ ID NOs: 76, 77, and 208; SEQ ID NOs:222-224; SEQ ID NOs: 76, 77, and 238; SEQ ID NOs:19, 20, and 252; SEQ ID NOs:266-268; or SEQ ID NOs:19, 20, and 278) and a beta chain (or delta chain) that includes a set of three CDRs (e.g., a CDR-1, CDR-2, and CDR-3) as set forth in Table 1 (e.g., SEQ ID NOs:9-10; SEQ ID NOs:9, 10, and 27; SEQ ID NOs:9, 10, and 43; SEQ ID NOs: 9, 10, and 57; SEQ ID NOs: 9, 10, and 84; SEQ ID NOs:9, 10, and 98; SEQ ID NOs:9, 10, and 112; SEQ ID NOs:9, 10, and 126; SEQ ID NOs:9, 10, and 142; SEQ ID NOs:9, 10, and 158; SEQ ID NOs:9, 10, and 172; SEQ ID NOs:9, 10, and 186; SEQ ID NOs:9, 10, and 200; SEQ ID NOs:9, 10, and 214; SEQ ID NOs:9, 10, and 230; SEQ ID NOs:9, 10, and 244; SEQ ID NOs:9, 10, and 258; or SEQ ID NOs:9, 10, and 284).

[0123] In some of any of the embodiments provided herein, the Vα region comprises a CDR-1 comprising SEQ ID NO:1, a CDR-2 comprising SEQ ID NO:2, and a CDR-3 comprising SEQ ID NO:3, and the Vβ region comprises a CDR-1 comprising SEQ ID NO:9, a CDR-2 comprising SEQ ID NO:10, and a CDR-3 comprising SEQ ID NO:11. In some of any of the embodiments provided herein, the Vα region comprises a CDR-1 comprising SEQ ID NO:19, a CDR-2 comprising SEQ ID NO:20, and a CDR-3 comprising SEQ ID NO:21, and the Vβ region comprises a CDR-1 comprising SEQ ID NO:9, a CDR-2 comprising SEQ ID NO:10, and a CDR-3 comprising SEQ ID NO:27. In some of any of the embodiments provided herein, the Vα region comprises a CDR-1 comprising SEQ ID NO:35, a CDR-2 comprising SEQ ID NO:36, and a CDR-3 comprising SEQ ID NO:37, and the Vβ region comprises a CDR-1 comprising SEQ ID NO:9, a CDR-2 comprising SEQ ID NO: 10, and a CDR-3 comprising SEQ ID NO:43. In some of any of the embodiments provided herein, the Vα region comprises a CDR-1 comprising SEQ ID NO:1, a CDR-2 comprising SEQ ID NO:2, and a CDR-3 comprising SEQ ID NO:51, and the Vβ region comprises a CDR-1 comprising SEQ ID NO:9, a CDR-2 comprising SEQ ID NO:10, and a CDR-3 comprising SEQ ID NO:57. In some of any of the embodiments provided herein, the Vα region comprises a CDR-1 comprising SEQ ID NO:1, a CDR-2 comprising SEQ ID NO:2, and a CDR-3 comprising SEQ ID NO:65, and the Vβ region comprises a CDR-1 comprising SEQ ID NO:9, a CDR-2 comprising SEQ ID NO: 10, and a CDR-3 comprising SEQ ID NO:57. In some of any of the embodiments provided herein, the Vα region comprises a CDR-1 comprising SEQ ID NO:76, a CDR-2 comprising SEQ ID NO:77, and a CDR-3 comprising SEQ ID NO: 78, and the Vβ region comprises a CDR-1 comprising SEQ ID NO:9, a CDR-2 comprising SEQ ID NO:10, and a CDR-3 comprising SEQ ID NO:84. In some of any of the embodiments provided herein, the Vα region comprises a CDR-1 comprising SEQ ID NO:19, a CDR-2 comprising SEQ ID NO:20, and a CDR-3 comprising SEQ ID NO:92, and the Vβ region comprises a CDR-1 comprising SEQ ID NO:9, a CDR-2 comprising SEQ ID NO:10, and a CDR-3 comprising SEQ ID NO:98. In some of any of the embodiments provided herein, the Vα region comprises a CDR-1 comprising SEQ ID NO:76, a CDR-2 comprising SEQ ID NO:77, and a CDR-3 comprising SEQ ID NO:106, and the Vβ region comprises a CDR-1 comprising SEQ ID NO:9, a CDR-2 comprising SEQ ID NO:10, and a CDR-3 comprising SEQ ID NO:112. In some of any of the embodiments provided herein, the Vα region comprises a CDR-1 comprising SEQ ID NO:35, a CDR-2 comprising SEQ ID NO:36, and a CDR-3 comprising SEQ ID NO:120, and the Vβ region comprises a CDR-1 comprising SEQ ID NO:9, a CDR-2 comprising SEQ ID NO: 10, and a CDR-3 comprising SEQ ID NO:126. In some of any of the embodiments provided herein, the Vα region comprises a CDR-1 comprising SEQ ID NO: 134, a CDR-2 comprising SEQ ID NO: 135, and a CDR-3 comprising SEQ ID NO:136, and the Vβ region comprises a CDR-1 comprising SEQ ID NO:9, a CDR-2 comprising SEQ ID NO:10, and a CDR-3 comprising SEQ ID NO: 142. In some of any of the embodiments provided herein, the Vα region comprises a CDR-1 comprising SEQ ID NO: 150, a CDR-2 comprising SEQ ID NO:151, and a CDR-3 comprising SEQ ID NO: 152, and the Vβ region comprises a CDR-1 comprising SEQ ID NO:9, a CDR-2 comprising SEQ ID NO:10, and a CDR-3 comprising SEQ ID NO:158. In some of any of the embodiments provided herein, the Vα region comprises a CDR-1 comprising SEQ ID NO:35, a CDR-2 comprising SEQ ID NO:36, and a CDR-3 comprising SEQ ID NO:166, and the Vβ region comprises a CDR-1 comprising SEQ ID NO:9, a CDR-2 comprising SEQ ID NO:10, and a CDR-3 comprising SEQ ID NO:172. In some of any of the embodiments provided herein, the Vα region comprises a CDR-1 comprising SEQ ID NO:35, a CDR-2 comprising SEQ ID NO:36, and a CDR-3 comprising SEQ ID NO: 180, and the Vβ region comprises a CDR-1 comprising SEQ ID NO:9, a CDR-2 comprising SEQ ID NO:10, and a CDR-3 comprising SEQ ID NO:186. In some of any of the embodiments provided herein, the Vα region comprises a CDR-1 comprising SEQ ID NO:76, a CDR-2 comprising SEQ ID NO:77, and a CDR-3 comprising SEQ ID NO: 194, and the Vβ region comprises a CDR-1 comprising SEQ ID NO:9, a CDR-2 comprising SEQ ID NO: 10, and a CDR-3 comprising SEQ ID NO:200. In some of any of the embodiments provided herein, the Vα region comprises a CDR-1 comprising SEQ ID NO:76, a CDR-2 comprising SEQ ID NO:77, and a CDR-3 comprising SEQ ID NO:208, and the Vβ region comprises a CDR-1 comprising SEQ ID NO:9, a CDR-2 comprising SEQ ID NO:10, and a CDR-3 comprising SEQ ID NO:214. In some of any of the embodiments provided herein, the Vα region comprises a CDR-1 comprising SEQ ID NO:222, a CDR-2 comprising SEQ ID NO:223, and a CDR-3 comprising SEQ ID NO:224, and the Vβ region comprises a CDR-1 comprising SEQ ID NO:9, a CDR-2 comprising SEQ ID NO:10, and a CDR-3 comprising SEQ ID NO:230. In some of any of the embodiments provided herein, the Vα region comprises a CDR-1 comprising SEQ ID NO:76, a CDR-2 comprising SEQ ID NO:77, and a CDR-3 comprising SEQ ID NO:238, and the Vβ region comprises a CDR-1 comprising SEQ ID NO:9, a CDR-2 comprising SEQ ID NO: 10, and a CDR-3 comprising SEQ ID NO:244. In some of any of the embodiments provided herein, the Vα region comprises a CDR-1 comprising SEQ ID NO:19, a CDR-2 comprising SEQ ID NO:20, and a CDR-3 comprising SEQ ID NO:252, and the Vβ region comprises a CDR-1 comprising SEQ ID NO:9, a CDR-2 comprising SEQ ID NO:10, and a CDR-3 comprising SEQ ID NO:258. In some of any of the embodiments provided herein, the Vα region comprises a CDR-1 comprising SEQ ID NO:266, a CDR-2 comprising SEQ ID NO:267, and a CDR-3 comprising SEQ ID NO:268, and the Vβ region comprises a CDR-1 comprising SEQ ID NO:9, a CDR-2 comprising SEQ ID NO: 10, and a CDR-3 comprising SEQ ID NO: 158. In some of any of the embodiments provided herein, the Vα region comprises a CDR-1 comprising SEQ ID NO:19, a CDR-2 comprising SEQ ID NO:20, and a CDR-3 comprising SEQ ID NO:278, and the Vβ region comprises a CDR-1 comprising SEQ ID NO:9, a CDR-2 comprising SEQ ID NO:10, and a CDR-3 comprising SEQ ID NO:284.

[0124] In some of any of the embodiments provided herein, the Vα region comprises a CDR-1, a CDR-2, and a CDR-3 comprising a CDR-1, a CDR-2, and a CDR-3, respectively, contained within the Vα region sequence of SEQ ID NO:4, and the Vβ region comprises a CDR-1, a CDR-2, and a CDR-3 comprising a CDR-1, a CDR-2, and a CDR-3, respectively, contained within the Vβ region sequence of SEQ ID NO:12. In some of any of the embodiments provided herein, the Vα region comprises a CDR-1, a CDR-2, and a CDR-3 comprising a CDR-1, a CDR-2, and a CDR-3, respectively, contained within the Vα region sequence of SEQ ID NO:22, and the Vβ region comprises a CDR-1, a CDR-2, and a CDR-3 comprising a CDR-1, a CDR-2, and a CDR-3, respectively, contained within the Vβ region sequence of SEQ ID NO:28. In some of any of the embodiments provided herein, the Vα region comprises a CDR-1, a CDR-2, and a CDR-3 comprising a CDR-1, a CDR-2, and a CDR-3, respectively, contained within the Vα region sequence of SEQ ID NO:38, and the Vβ region comprises a CDR-1, a CDR-2, and a CDR-3 comprising a CDR-1, a CDR-2, and a CDR-3, respectively, contained within the Vβ region sequence of SEQ ID NO:44. In some of any of the embodiments provided herein, the Vα region comprises a CDR-1, a CDR-2, and a CDR-3 comprising a CDR-1, a CDR-2, and a CDR-3, respectively, contained within the Vα region sequence of SEQ ID NO:52, and the Vβ region comprises a CDR-1, a CDR-2, and a CDR-3 comprising a CDR-1, a CDR-2, and a CDR-3, respectively, contained within the Vβ region sequence of SEQ ID NO:58. In some of any of the embodiments provided herein, the Vα region comprises a CDR-1, a CDR-2, and a CDR-3 comprising a CDR-1, a CDR-2, and a CDR-3, respectively, contained within the Vα region sequence of SEQ ID NO:66, and the Vβ region comprises a CDR-1, a CDR-2, and a CDR-3 comprising a CDR-1, a CDR-2, and a CDR-3, respectively, contained within the Vβ region sequence of SEQ ID NO:58. In some of any of the embodiments provided herein, the Vα region comprises a CDR-1, a CDR-2, and a CDR-3 comprising a CDR-1, a CDR-2, and a CDR-3, respectively, contained within the Vα region sequence of SEQ ID NO:79, and the Vβ region comprises a CDR-1, a CDR-2, and a CDR-3 comprising a CDR-1, a CDR-2, and a CDR-3, respectively, contained within the Vβ region sequence of SEQ ID NO:85. In some of any of the embodiments provided herein, the Vα region comprises a CDR-1, a CDR-2, and a CDR-3 comprising a CDR-1, a CDR-2, and a CDR-3, respectively, contained within the Vα region sequence of SEQ ID NO:93, and the Vβ region comprises a CDR-1, a CDR-2, and a CDR-3 comprising a CDR-1, a CDR-2, and a CDR-3, respectively, contained within the Vβ region sequence of SEQ ID NO:99. In some of any of the embodiments provided herein, the Vα region comprises a CDR-1, a CDR-2, and a CDR-3 comprising a CDR-1, a CDR-2, and a CDR-3, respectively, contained within the Vα region sequence of SEQ ID NO:107, and the Vβ region comprises a CDR-1, a CDR-2, and a CDR-3 comprising a CDR-1, a CDR-2, and a CDR-3, respectively, contained within the Vβ region sequence of SEQ ID NO: 113. In some of any of the embodiments provided herein, the Vα region comprises a CDR-1, a CDR-2, and a CDR-3 comprising a CDR-1, a CDR-2, and a CDR-3, respectively, contained within the Vα region sequence of SEQ ID NO: 121, and the Vβ region comprises a CDR-1, a CDR-2, and a CDR-3 comprising a CDR-1, a CDR-2, and a CDR-3, respectively, contained within the Vβ region sequence of SEQ ID NO: 127. In some of any of the embodiments provided herein, the Vα region comprises a CDR-1, a CDR-2, and a CDR-3 comprising a CDR-1, a CDR-2, and a CDR-3, respectively, contained within the Vα region sequence of SEQ ID NO:137, and the Vβ region comprises a CDR-1, a CDR-2, and a CDR-3 comprising a CDR-1, a CDR-2, and a CDR-3, respectively, contained within the Vβ region sequence of SEQ ID NO:143. In some of any of the embodiments provided herein, the Vα region comprises a CDR-1, a CDR-2, and a CDR-3 comprising a CDR-1, a CDR-2, and a CDR-3, respectively, contained within the Vα region sequence of SEQ ID NO:153, and the Vβ region comprises a CDR-1, a CDR-2, and a CDR-3 comprising a CDR-1, a CDR-2, and a CDR-3, respectively, contained within the Vβ region sequence of SEQ ID NO: 159. In some of any of the embodiments provided herein, the Vα region comprises a CDR-1, a CDR-2, and a CDR-3 comprising a CDR-1, a CDR-2, and a CDR-3, respectively, contained within the Vα region sequence of SEQ ID NO: 167, and the Vβ region comprises a CDR-1, a CDR-2, and a CDR-3 comprising a CDR-1, a CDR-2, and a CDR-3, respectively, contained within the Vβ region sequence of SEQ ID NO: 173. In some of any of the embodiments provided herein, the Vα region comprises a CDR-1, a CDR-2, and a CDR-3 comprising a CDR-1, a CDR-2, and a CDR-3, respectively, contained within the Vα region sequence of SEQ ID NO: 181, and the Vβ region comprises a CDR-1, a CDR-2, and a CDR-3 comprising a CDR-1, a CDR-2, and a CDR-3, respectively, contained within the Vβ region sequence of SEQ ID NO: 187. In some of any of the embodiments provided herein, the Vα region comprises a CDR-1, a CDR-2, and a CDR-3 comprising a CDR-1, a CDR-2, and a CDR-3, respectively, contained within the Vα region sequence of SEQ ID NO:195, and the Vβ region comprises a CDR-1, a CDR-2, and a CDR-3 comprising a CDR-1, a CDR-2, and a CDR-3, respectively, contained within the Vβ region sequence of SEQ ID NO:201. In some of any of the embodiments provided herein, the Vα region comprises a CDR-1, a CDR-2, and a CDR-3 comprising a CDR-1, a CDR-2, and a CDR-3, respectively, contained within the Vα region sequence of SEQ ID NO:209, and the Vβ region comprises a CDR-1, a CDR-2, and a CDR-3 comprising a CDR-1, a CDR-2, and a CDR-3, respectively, contained within the Vβ region sequence of SEQ ID NO:215. In some of any of the embodiments provided herein, the Vα region comprises a CDR-1, a CDR-2, and a CDR-3 comprising a CDR-1, a CDR-2, and a CDR-3, respectively, contained within the Vα region sequence of SEQ ID NO:225, and the Vβ region comprises a CDR-1, a CDR-2, and a CDR-3 comprising a CDR-1, a CDR-2, and a CDR-3, respectively, contained within the Vβ region sequence of SEQ ID NO:231. In some of any of the embodiments provided herein, the Vα region comprises a CDR-1, a CDR-2, and a CDR-3 comprising a CDR-1, a CDR-2, and a CDR-3, respectively, contained within the Vα region sequence of SEQ ID NO:239, and the Vβ region comprises a CDR-1, a CDR-2, and a CDR-3 comprising a CDR-1, a CDR-2, and a CDR-3, respectively, contained within the Vβ region sequence of SEQ ID NO:245. In some of any of the embodiments provided herein, the Vα region comprises a CDR-1, a CDR-2, and a CDR-3 comprising a CDR-1, a CDR-2, and a CDR-3, respectively, contained within the Vα region sequence of SEQ ID NO:253, and the Vβ region comprises a CDR-1, a CDR-2, and a CDR-3 comprising a CDR-1, a CDR-2, and a CDR-3, respectively, contained within the Vβ region sequence of SEQ ID NO:259. In some of any of the embodiments provided herein, the Vα region comprises a CDR-1, a CDR-2, and a CDR-3 comprising a CDR-1, a CDR-2, and a CDR-3, respectively, contained within the Vα region sequence of SEQ ID NO:269, and the Vβ region comprises a CDR-1, a CDR-2, and a CDR-3 comprising a CDR-1, a CDR-2, and a CDR-3, respectively, contained within the Vβ region sequence of SEQ ID NO:159. In some of any of the embodiments provided herein, the Vα region comprises a CDR-1, a CDR-2, and a CDR-3 comprising a CDR-1, a CDR-2, and a CDR-3, respectively, contained within the Vα region sequence of SEQ ID NO:279, and the Vβ region comprises a CDR-1, a CDR-2, and a CDR-3 comprising a CDR-1, a CDR-2, and a CDR-3, respectively, contained within the Vβ region sequence of SEQ ID NO:285. In some of any of the embodiments provided herein, the Vα region comprises a CDR-1, a CDR-2, and a CDR-3 comprising a CDR-1, a CDR-2, and a CDR-3, respectively, contained within the Vα region sequence of SEQ ID NO:360, and the Vβ region comprises a CDR-1, a CDR-2, and a CDR-3 comprising a CDR-1, a CDR-2, and a CDR-3, respectively, contained within the Vβ region sequence of SEQ ID NO:364. In some of any of the embodiments provided herein, the Vα region comprises a CDR-1, a CDR-2, and a CDR-3 comprising a CDR-1, a CDR-2, and a CDR-3, respectively, contained within the Vα region sequence of SEQ ID NO:370, and the Vβ region comprises a CDR-1, a CDR-2, and a CDR-3 comprising a CDR-1, a CDR-2, and a CDR-3, respectively, contained within the Vβ region sequence of SEQ ID NO:374. In some of any of the embodiments provided herein, the Vα region comprises a CDR-1, a CDR-2, and a CDR-3 comprising a CDR-1, a CDR-2, and a CDR-3, respectively, contained within the Vα region sequence of SEQ ID NO:380, and the Vβ region comprises a CDR-1, a CDR-2, and a CDR-3 comprising a CDR-1, a CDR-2, and a CDR-3, respectively, contained within the Vβ region sequence of SEQ ID NO:384. In some of any of the embodiments provided herein, the Vα region comprises a CDR-1, a CDR-2, and a CDR-3 comprising a CDR-1, a CDR-2, and a CDR-3, respectively, contained within the Vα region sequence of SEQ ID NO:390, and the Vβ region comprises a CDR-1, a CDR-2, and a CDR-3 comprising a CDR-1, a CDR-2, and a CDR-3, respectively, contained within the Vβ region sequence of SEQ ID NO:394. In some of any of the embodiments provided herein, the Vα region comprises a CDR-1, a CDR-2, and a CDR-3 comprising a CDR-1, a CDR-2, and a CDR-3, respectively, contained within the Vα region sequence of SEQ ID NO:400, and the Vβ region comprises a CDR-1, a CDR-2, and a CDR-3 comprising a CDR-1, a CDR-2, and a CDR-3, respectively, contained within the Vβ region sequence of SEQ ID NO:404. In some of any of the embodiments provided herein, the Vα region comprises a CDR-1, a CDR-2, and a CDR-3 comprising a CDR-1, a CDR-2, and a CDR-3, respectively, contained within the Vα region sequence of SEQ ID NO:410, and the Vβ region comprises a CDR-1, a CDR-2, and a CDR-3 comprising a CDR-1, a CDR-2, and a CDR-3, respectively, contained within the Vβ region sequence of SEQ ID NO:414. In some of any of the embodiments provided herein, the Vα region comprises a CDR-1, a CDR-2, and a CDR-3 comprising a CDR-1, a CDR-2, and a CDR-3, respectively, contained within the Vα region sequence of SEQ ID NO:420, and the Vβ region comprises a CDR-1, a CDR-2, and a CDR-3 comprising a CDR-1, a CDR-2, and a CDR-3, respectively, contained within the Vβ region sequence of SEQ ID NO:424. In some of any of the embodiments provided herein, the Vα region comprises a CDR-1, a CDR-2, and a CDR-3 comprising a CDR-1, a CDR-2, and a CDR-3, respectively, contained within the Vα region sequence of SEQ ID NO:430 and the Vβ region comprises a CDR-1, a CDR-2, and a CDR-3 comprising a CDR-1, a CDR-2, and a CDR-3, respectively, contained within the Vβ region sequence of SEQ ID NO:434. In some of any of the embodiments provided herein, the Vα region comprises a CDR-1, a CDR-2, and a CDR-3 comprising a CDR-1, a CDR-2, and a CDR-3, respectively, contained within the Vα region sequence of SEQ ID NO:440, and the Vβ region comprises a CDR-1, a CDR-2, and a CDR-3 comprising a CDR-1, a CDR-2, and a CDR-3, respectively, contained within the Vβ region sequence of SEQ ID NO:444. In some of any of the embodiments provided herein, the Vα region comprises a CDR-1, a CDR-2, and a CDR-3 comprising a CDR-1, a CDR-2, and a CDR-3, respectively, contained within the Vα region sequence of SEQ ID NO: 450 and the Vβ region comprises a CDR-1, a CDR-2, and a CDR-3 comprising a CDR-1, a CDR-2, and a CDR-3, respectively, contained within the Vβ region sequence of SEQ ID NO:454. In some of any of the embodiments provided herein, the Vα region comprises a CDR-1, a CDR-2, and a CDR-3 comprising a CDR-1, a CDR-2, and a CDR-3, respectively, contained within the Vα region sequence of SEQ ID NO: 481 and the Vβ region comprises a CDR-1, a CDR-2, and a CDR-3 comprising a CDR-1, a CDR-2, and a CDR-3, respectively, contained within the Vβ region sequence of SEQ ID NO:485.

[0125] In some of any of the embodiments provided herein, the Vα region comprises SEQ ID NO:4 or a sequence that has at least 90% sequence identity thereto, and the Vβ region comprises SEQ ID NO:12 or a sequence that has at least 90% sequence identity thereto. In some of any of the embodiments provided herein, the Vα region comprises SEQ ID NO:22 or a sequence that has at least 90% sequence identity thereto, and the Vβ region comprises SEQ ID NO:28 or a sequence that has at least 90% sequence identity thereto. In some of any of the embodiments provided herein, the Vα region comprises SEQ ID NO:38 or a sequence that has at least 90% sequence identity thereto, and the Vβ region comprises SEQ ID NO:44 or a sequence that has at least 90% sequence identity thereto. In some of any of the embodiments provided herein, the Vα region comprises SEQ ID NO:52 or a sequence that has at least 90% sequence identity thereto, and the Vβ region comprises SEQ ID NO:58 or a sequence that has at least 90% sequence identity thereto. In some of any of the embodiments provided herein, the Vα region comprises SEQ ID NO:66 or a sequence that has at least 90% sequence identity thereto, and the Vβ region comprises SEQ ID NO:58 or a sequence that has at least 90% sequence identity thereto. In some of any of the embodiments provided herein, the Vα region comprises SEQ ID NO:79 or a sequence that has at least 90% sequence identity thereto, and the Vβ region comprises SEQ ID NO:85 or a sequence that has at least 90% sequence identity thereto. In some of any of the embodiments provided herein, the Vα region comprises SEQ ID NO:93 or a sequence that has at least 90% sequence identity thereto, and the Vβ region comprises SEQ ID NO:99 or a sequence that has at least 90% sequence identity thereto. In some of any of the embodiments provided herein, the Vα region comprises SEQ ID NO:107 or a sequence that has at least 90% sequence identity thereto, and the Vβ region comprises SEQ ID NO:113 or a sequence that has at least 90% sequence identity thereto. In some of any of the embodiments provided herein, the Vα region comprises SEQ ID NO: 121 or a sequence that has at least 90% sequence identity thereto, and the Vβ region comprises SEQ ID NO: 127 or a sequence that has at least 90% sequence identity thereto. In some of any of the embodiments provided herein, the Vα region comprises SEQ ID NO:137 or a sequence that has at least 90% sequence identity thereto, and the Vβ region comprises SEQ ID NO: 143 or a sequence that has at least 90% sequence identity thereto. In some of any of the embodiments provided herein, the Vα region comprises SEQ ID NO:153 or a sequence that has at least 90% sequence identity thereto, and the Vβ region comprises SEQ ID NO: 159 or a sequence that has at least 90% sequence identity thereto. In some of any of the embodiments provided herein, the Vα region comprises SEQ ID NO:167 or a sequence that has at least 90% sequence identity thereto, and the Vβ region comprises SEQ ID NO: 173 or a sequence that has at least 90% sequence identity thereto. In some of any of the embodiments provided herein, the Vα region comprises SEQ ID NO:181 or a sequence that has at least 90% sequence identity thereto, and the Vβ region comprises SEQ ID NO:187 or a sequence that has at least 90% sequence identity thereto. In some of any of the embodiments provided herein, the Vα region comprises SEQ ID NO: 195 or a sequence that has at least 90% sequence identity thereto, and the Vβ region comprises SEQ ID NO:201 or a sequence that has at least 90% sequence identity thereto. In some of any of the embodiments provided herein, the Vα region comprises SEQ ID NO:209 or a sequence that has at least 90% sequence identity thereto, and the Vβ region comprises SEQ ID NO:215 or a sequence that has at least 90% sequence identity thereto. In some of any of the embodiments provided herein, the Vα region comprises SEQ ID NO:225 or a sequence that has at least 90% sequence identity thereto, and the Vβ region comprises SEQ ID NO:231 or a sequence that has at least 90% sequence identity thereto. In some of any of the embodiments provided herein, the Vα region comprises SEQ ID NO:239 or a sequence that has at least 90% sequence identity thereto, and the Vβ region comprises SEQ ID NO:245 or a sequence that has at least 90% sequence identity thereto. In some of any of the embodiments provided herein, the Vα region comprises SEQ ID NO:253 or a sequence that has at least 90% sequence identity thereto, and the Vβ region comprises SEQ ID NO:259 or a sequence that has at least 90% sequence identity thereto. In some of any of the embodiments provided herein, the Vα region comprises SEQ ID NO:269 or a sequence that has at least 90% sequence identity thereto, and the Vβ region comprises SEQ ID NO:159 or a sequence that has at least 90% sequence identity thereto. In some of any of the embodiments provided herein, the Vα region comprises SEQ ID NO:279 or a sequence that has at least 90% sequence identity thereto, and the Vβ region comprises SEQ ID NO:285 or a sequence that has at least 90% sequence identity thereto. In some of any of the embodiments provided herein, the Vα region comprises SEQ ID NO:360 or a sequence that has at least 90% sequence identity thereto, and the Vβ region comprises SEQ ID NO:364 or a sequence that has at least 90% sequence identity thereto. In some of any of the embodiments provided herein, the Vα region comprises SEQ ID NO:370 or a sequence that has at least 90% sequence identity thereto, and the Vβ region comprises SEQ ID NO:374 or a sequence that has at least 90% sequence identity thereto. In some of any of the embodiments provided herein, the Vα region comprises SEQ ID NO:380 or a sequence that has at least 90% sequence identity thereto, and the Vβ region comprises SEQ ID NO:384 or a sequence that has at least 90% sequence identity thereto. In some of any of the embodiments provided herein, the Vα region comprises SEQ ID NO:390 or a sequence that has at least 90% sequence identity thereto, and the Vβ region comprises SEQ ID NO:394 or a sequence that has at least 90% sequence identity thereto. In some of any of the embodiments provided herein, the Vα region comprises SEQ ID NO:400 or a sequence that has at least 90% sequence identity thereto, and the Vβ region comprises SEQ ID NO:404 or a sequence that has at least 90% sequence identity thereto. In some of any of the embodiments provided herein, the Vα region comprises SEQ ID NO:410 or a sequence that has at least 90% sequence identity thereto, and the Vβ region comprises SEQ ID NO:414 or a sequence that has at least 90% sequence identity thereto. In some of any of the embodiments provided herein, the Vα region comprises SEQ ID NO:420 or a sequence that has at least 90% sequence identity thereto, and the Vβ region comprises SEQ ID NO:424 or a sequence that has at least 90% sequence identity thereto. In some of any of the embodiments provided herein, the Vα region comprises SEQ ID NO:430 or a sequence that has at least 90% sequence identity thereto, and the Vβ region comprises SEQ ID NO:434 or a sequence that has at least 90% sequence identity thereto. In some of any of the embodiments provided herein, the Vα region comprises SEQ ID NO:440 or a sequence that has at least 90% sequence identity thereto, and the Vβ region comprises SEQ ID NO:444 or a sequence that has at least 90% sequence identity thereto. In some of any of the embodiments provided herein, the Vα region comprises SEQ ID NO:450 or a sequence that has at least 90% sequence identity thereto, and the Vβ region comprises SEQ ID NO:454 or a sequence that has at least 90% sequence identity thereto. In some of any of the embodiments provided herein, the Vα region comprises SEQ ID NO:481 or a sequence that has at least 90% sequence identity thereto, and the Vβ region comprises SEQ ID NO:485 or a sequence that has at least 90% sequence identity thereto.

[0126] In some of any of the embodiments provided herein, the Vα region comprises SEQ ID NO:4, and the Vβ region comprises SEQ ID NO:12. In some of any of the embodiments provided herein, the Vα region comprises SEQ ID NO:22, and the Vβ region comprises SEQ ID NO:28. In some of any of the embodiments provided herein, the Vα region comprises SEQ ID NO:38, and the Vβ region comprises SEQ ID NO:44. In some of any of the embodiments provided herein, the Vα region comprises SEQ ID NO:52, and the Vβ region comprises SEQ ID NO:58. In some of any of the embodiments provided herein, the Vα region comprises SEQ ID NO:66, and the Vβ region comprises SEQ ID NO:58. In some of any of the embodiments provided herein, the Vα region comprises SEQ ID NO:79, and the Vβ region comprises SEQ ID NO:85. In some of any of the embodiments provided herein, the Vα region comprises SEQ ID NO:93, and the Vβ region comprises SEQ ID NO:99. In some of any of the embodiments provided herein, the Vα region comprises SEQ ID NO:107, and the Vβ region comprises SEQ ID NO: 113. In some of any of the embodiments provided herein, the Vα region comprises SEQ ID NO:121, and the Vβ region comprises SEQ ID NO:127. In some of any of the embodiments provided herein, the Vα region comprises SEQ ID NO:137, and the Vβ region comprises SEQ ID NO: 143. In some of any of the embodiments provided herein, the Vα region comprises SEQ ID NO: 153, and the Vβ region comprises SEQ ID NO: 159. In some of any of the embodiments provided herein, the Vα region comprises SEQ ID NO:167, and the Vβ region comprises SEQ ID NO: 173. In some of any of the embodiments provided herein, the Vα region comprises SEQ ID NO: 181, and the Vβ region comprises SEQ ID NO: 187. In some of any of the embodiments provided herein, the Vα region comprises SEQ ID NO: 195, and the Vβ region comprises SEQ ID NO:201. In some of any of the embodiments provided herein, the Vα region comprises SEQ ID NO:209, and the Vβ region comprises SEQ ID NO:215. In some of any of the embodiments provided herein, the Vα region comprises SEQ ID NO:225, and the Vβ region comprises SEQ ID NO:231. In some of any of the embodiments provided herein, the Vα region comprises SEQ ID NO:239, and the Vβ region comprises SEQ ID NO:245. In some of any of the embodiments provided herein, the Vα region comprises SEQ ID NO:253, and the Vβ region comprises SEQ ID NO:259. In some of any of the embodiments provided herein, the Vα region comprises SEQ ID NO:269, and the Vβ region comprises SEQ ID NO: 159. In some of any of the embodiments provided herein, the Vα region comprises SEQ ID NO:279, and the Vβ region comprises SEQ ID NO:285. In some of any of the embodiments provided herein, the Vα region comprises SEQ ID NO:360, and the Vβ region comprises SEQ ID NO:364. In some of any of the embodiments provided herein, the Vα region comprises SEQ ID NO:370, and the Vβ region comprises SEQ ID NO:374. In some of any of the embodiments provided herein, the Vα region comprises SEQ ID NO:380, and the Vβ region comprises SEQ ID NO:384. In some of any of the embodiments provided herein, the Vα region comprises SEQ ID NO:390, and the Vβ region comprises SEQ ID NO:394. In some of any of the embodiments provided herein, the Vα region comprises SEQ ID NO:400, and the Vβ region comprises SEQ ID NO:404. In some of any of the embodiments provided herein, the Vα region comprises SEQ ID NO:410, and the Vβ region comprises SEQ ID NO:414. In some of any of the embodiments provided herein, the Vα region comprises SEQ ID NO:420, and the Vβ region comprises SEQ ID NO:424. In some of any of the embodiments provided herein, the Vα region comprises SEQ ID NO:430, and the Vβ region comprises SEQ ID NO:434. In some of any of the embodiments provided herein, the Vα region comprises SEQ ID NO:440, and the Vβ region comprises SEQ ID NO:444. In some of any of the embodiments provided herein, the Vα region comprises SEQ ID NO: 450, and the Vβ region comprises SEQ ID NO:454. In some of any of the embodiments provided herein, the Vα region comprises SEQ ID NO: 481, and the Vβ region comprises SEQ ID NO:485.

### D. Exemplary Constant Domains

[0127] In some embodiments, the alpha chain of a TCR or antigen-binding fragment thereof provided herein further contains an alpha constant (Cα) region or portion thereof. In some aspects, the beta chain further contains a beta constant (Cβ) region or portion thereof. Thus, in some embodiments, a TCR provided herein (e.g., an anti-HA-1 TCR provided herein) or an antigen-binding fragment thereof contains an alpha chain comprising a Vα region and a Cα domain or portion thereof and/or a beta chain comprising a Vβ region and a Cβ domain or portion thereof. In some embodiments, the gamma chain of a TCR or antigen-binding fragment thereof provided herein further contains a gamma constant (Cδ) region or portion thereof. In some aspects, the delta chain further contains a delta constant (Cδ) region or portion thereof. Thus, in some embodiments, a TCR provided herein (e.g., an anti-HA-1 TCR provided herein) or an antigen-binding fragment thereof contains a gamma chain comprising a Vγ region and a Cy domain or portion thereof and/or a delta chain comprising a Vδ region and a Cδ domain or portion thereof.

[0128] In some embodiments, the α chain and the β chain, or the γ chain and the δ chain, of a TCR provided herein each further contain a constant domain. In some embodiments, the Cα domain and Cβ domain, or the Cγ domain and Cδ domain, individually are mammalian (e.g., a human or murine constant domain). In some embodiments, the constant domain is adjacent to the cell membrane. For example, in some cases, the extracellular portion of the TCR formed by the two chains contains two membrane-proximal constant domains, and two membrane-distal variable domains, which variable domains each contain CDRs.

[0129] In some aspects, provided herein are TCRs that contains a human constant domain, such as an alpha chain containing a human Cα domain and a beta chain containing a human Cβ domain, or a gamma chain containing a human Cγ domain and a delta chain containing a human Cδ domain. In some embodiments, the provided TCRs are fully human. Among the provided TCRs are TCRs containing a human constant domain, such as fully human TCRs, whose expression and/or activity, such as when expressed in human cells, e.g. human T cells, such as primary human T cells, are not impacted by or are not substantially impacted by the presence of an endogenous human TCR.

[0130] In some embodiments, each of the Cα and the Cβ domains, or each of the Cγ and the C8 domains, is human. In some embodiments, the Cα is encoded by the TRAC gene (IMGT nomenclature) or is a variant thereof. In some embodiments, the Cβ is encoded by TRBC1 or TRBC2 genes (IMGT nomenclature) or is a variant thereof. In some embodiments, the Cγ is encoded by the TRGC1 or TRGC2 genes (IMGT nomenclature) or is a variant thereof. In some embodiments, the C8 is encoded by TRDC genes (IMGT nomenclature) or is a variant thereof.

[0131] In some embodiments, the Cα domain or a variant thereof has or comprises the sequence of amino acids set forth in SEQ ID NO: 294 or 296, or a sequence of amino acids that exhibits at least 85%, 86%, 87%, 88%, 89%, 90%, 91%, 92%, 93%, 94%, 95%, 96%, 97%, 98%, 99% or more sequence identity to SEQ ID NO: 294 or 296. In some embodiments, the Cα domain has or comprises the sequence of amino acids set forth in SEQ ID NO: 294. In some embodiments, the Cα domain has or comprises the sequence of amino acids set forth in SEQ ID NO: 296. In some embodiments, the Cβ domain or variant thereof has or comprises the sequence of amino acids set forth in SEQ ID NO:298 or 300, or a sequence of amino acids that exhibits at least 85%, 86%, 87%, 88%, 89%, 90%, 91%, 92%, 93%, 94%, 95%, 96%, 97%, 98%, 99% or more sequence identity to SEQ ID NO: 298 or 300. In some embodiments, the Cβ domain has or comprises the sequence of amino acids set forth in SEQ ID NO: 298. In some embodiments, the Cβ domain has or comprises the sequence of amino acids set forth in SEQ ID NO:300. In some embodiments, the TCR comprises a Cα domain and a Cβ domain set forth in SEQ ID NO:294 and 298, respectively. In some embodiments, the TCR comprises a Cα domain and a Cβ domain set forth in SEQ ID NO:296 and 298, respectively. In some embodiments, the TCR comprises a Cα domain and a Cβ domain set forth in SEQ ID NO:294 and 300, respectively. In some embodiments, the TCR comprises a Cα domain and a Cβ domain set forth in SEQ ID NO:296 and 300, respectively.

[0132] In some embodiments, the Cγ domain or a variant thereof has or comprises the sequence of amino acids set forth in SEQ ID NO: 356 or 358, or a sequence of amino acids that exhibits at least 85%, 86%, 87%, 88%, 89%, 90%, 91%, 92%, 93%, 94%, 95%, 96%, 97%, 98%, 99% or more sequence identity to SEQ ID NO: 356 or 357. In some embodiments, the Cγ domain has or comprises the sequence of amino acids set forth in SEQ ID NO: 356. In some embodiments, the Cγ domain has or comprises the sequence of amino acids set forth in SEQ ID NO: 357. In some embodiments, the Cδ domain or variant thereof has or comprises the sequence of amino acids set forth in SEQ ID NO:358 or a sequence of amino acids that exhibits at least 85%, 86%, 87%, 88%, 89%, 90%, 91%, 92%, 93%, 94%, 95%, 96%, 97%, 98%, 99% or more sequence identity to SEQ ID NO: 358. In some embodiments, the TCR comprises a Cγ domain and a Cδ domain set forth in SEQ ID NO:356 and 358, respectively. In some embodiments, the TCR comprises a Cγ domain and a Cδ domain set forth in SEQ ID NO:357 and 358, respectively.

[0133] In some embodiments, the variant of a Cα domain contains replacement of at least one non-native cysteine, such as any replacement described herein. In some embodiments, the variant of a Cβ domain contains replacement of at least one non-native cysteine, such as any replacement described herein.

[0134] In some embodiments, any of the provided TCRs or antigen-binding fragments thereof can be a human/mouse chimeric TCR. In some cases, a TCR or antigen-binding fragment thereof provided herein comprises an alpha chain and/or a beta chain, or a gamma chain and/or a delta chain, comprising a mouse constant domain. In some embodiments, the Cα domain and/or the Cβ domain, or the Cγ domain and/or the Cδ domain, are a mouse Cα domain and/or a mouse Cβ domain, or a mouse Cγ domain and/or a mouse Cδ domain. In some embodiments, the Cα domain and/or the Cβ domain, or the Cγ domain and/or the Cδ domain, is or comprises any Cα domain and/or Cβ domain, or Cγ domain and/or Cδ domain described in WO 2015/184228, WO 2015/009604 and WO 2015/009606.

[0135] In some embodiments, a TCR or antigen-binding fragment thereof provided herein comprises a variant of an alpha chain and/or a beta chain, or a gamma chain and/or a delta chain. In some embodiments, the variant comprises the amino acid sequence of any of the TCRs described herein with one, two, three, or four or more amino acid substitution(s) in the constant domain of the alpha or beta chain. In some embodiments, the TCRs (or functional portions thereof) comprising the substituted amino acid sequence(s) advantageously provide one or more of decreased mis-pairing with an endogenous TCR chain(s), increased expression by a host cell, increased recognition of HA-1 targets, and increased anti-tumor activity as compared to the parent TCR comprising an unsubstituted amino acid sequence.

[0136] In some embodiments, the constant domain contains substituted amino acid sequences of the mouse constant domains of the TCR α and β chains, or TCR γ and δ chains corresponding with all or portions of the unsubstituted mouse Cα domain and mouse Cβ domain, or mouse Cγ domain and mouse Cδ domain. In some embodiments, the TCR may be a heterodimer of the α and β chains, or the γ and δ chains that are linked, such as by a disulfide bond or disulfide bonds. In some embodiments, the constant domain of the TCR may contain short connecting sequences in which a cysteine residue forms a disulfide bond, thereby linking the two chains of the TCR. In some embodiments, a TCR may have an additional cysteine residue in each of the α and β chains, or the γ and δ chains, such that the TCR contains two disulfide bonds in the constant domains. In some embodiments, each of the constant and variable domains contains disulfide bonds formed by cysteine residues.

[0137] In some embodiments, a TCR provided herein can contain an introduced disulfide bond or bonds. In some embodiments, the native disulfide bonds are not present. In some embodiments, the one or more of the native cysteines (e.g. in the constant domain of the α chain and the β chain, or the γ chain and the δ chain) that form a native interchain disulfide bond are substituted to another residue, such as to a serine or alanine. In some embodiments, an introduced disulfide bond can be formed by mutating non-cysteine residues on the alpha and beta chains, such as in the constant domain of the α chain and the β chain, or the γ chain and the δ chain, to cysteine. Opposing cysteines in the TCR α and β chains, or TCR γ and δ chains provide a disulfide bond that links the constant domains of TCR α and β chains, or TCR γ and δ chains of the substituted TCR to one another and which is not present in a TCR comprising the unsubstituted constant domain in which the native disulfide bonds are present, such as unsubstituted native human constant domain or the unsubstituted native mouse constant domain. In some embodiments, the presence of non-native cysteine residues (e.g. resulting in one or more non-native disulfide bonds) in a recombinant TCR can favor production of the desired recombinant TCR in a cell in which it is introduced over expression of a mismatched TCR pair containing a native TCR chain.

[0138] Exemplary non-native disulfide bonds of a TCR are described in published International PCT Patent Application No. WO2006/000830 and WO2006/037960. In some embodiments, cysteines can be introduced or substituted at a residue corresponding to Thr48 of the Cα domain and Ser57 of the Cβ domain, at residue Thr45 of the Cα domain and Ser77 of the Cβ domain, at residue Tyr 10 of the Cα domain and Ser17 of the Cβ domain, at residue Thr45 of the Cα domain and Asp59 of the Cβ domain and/or at residue Ser15 of the Cα domain and Glu15 of the Cβ domain.

[0139] In some embodiments, any of the provided cysteine mutations can be made at a corresponding position in another sequence, for example, in a human or mouse Cα domain and/or Cβ domain, or Cγ domain and/or Cδ domain, sequence described above. The term “corresponding” with reference to positions of a protein, such as recitation that amino acid positions “correspond to” amino acid positions in a disclosed sequence, such as set forth in the Sequence Listing, refers to amino acid positions identified upon alignment with the disclosed sequence based on structural sequence alignment or using a standard alignment algorithm, such as the GAP algorithm. For example, corresponding residues can be determined by alignment of a reference sequence with the Cα sequence set forth in any of SEQ ID NO: 294 or 296, or the Cβ sequence set forth in SEQ ID NO: 298 or 300, by structural alignment methods as described herein. By aligning the sequences, one can identify corresponding residues, for example, using conserved and identical amino acid residues as guides.

[0140] In some embodiments, a TCR or antigen-binding fragment thereof provided herein comprises an alpha or gamma chain that is or comprises the sequence of amino acids set forth in any of SEQ ID NOs: 6, 24, 40, 54, 68, 81, 95, 109, 123, 139, 155, 169, 183, 197, 211, 227, 241, 255, 271, 281, 362, 372, 382, 392, 402, 412, 422, 432, 442, 452 and 483, or a sequence that has at least 90% sequence identity thereto, such as a sequence having at least at or about 90%, 91%, 92%, 93%, 94%, 95%, 96%, 97%, 98%, or 99% identity with such a sequence and/or a beta or delta chain that is or comprises the sequence of amino acids set forth in SEQ ID NO: 14, 30, 46, 60, 71, 87, 101, 115, 129, 145, 161, 175, 189, 203, 217, 233, 247, 261, 161, 287, 366, 376, 386, 396, 406, 416, 426, 436, 446, 456, and 487, or a sequence that has at least 90% sequence identity thereto, such as a sequence having at least at or about 90%, 91%, 92%, 93%, 94%, 95%, 96%, 97%, 98%, or 99% identity with such a sequence.

[0141] Exemplary TCRs or antigen-binding fragments include those set forth in Table 2, such as in each row therein. In some embodiments, the Vα and Vβ region, or the Vγ and Vδ region, contain the amino acid sequences corresponding to the SEQ ID NOs: set forth in Table 2, such as in each row therein. In some embodiments, the Vα and Vβ region, or the Vγ and Vδ region, contain the CDR-1, the CDR-2 and the CDR-3 sequences contained within the Vα and Vβ region, or the Vγ and Vδ region, set forth in Table 2, such as in each row therein. In some aspects, the TCR contains constant alpha and constant beta domain sequences, such as those corresponding to the SEQ ID NOs: set forth in Table 2, such as in each row therein. In some cases, the TCR contains a full sequence comprising the variable and constant domains, such as a sequence corresponding to the SEQ ID NOs: set forth in Table 2 (“Full”), such as in each row therein. Also among the provided TCRs are those containing sequences at least at or about 90%, 91%, 92%, 93%, 94%, 95%, 96%, 97%, 98%, or 99% identical to such sequences. Exemplary TCRs containing such sequences, or their modified versions as described elsewhere herein, also are set forth in the Table 2, respectively, such as in each row therein. In some aspects, the provided exemplary TCRs, when expressed as a mature protein, comprises the mature Vα and/or mature Vβ region, or the mature Vγ and/or Vδ mature region, for example, without the signal sequence (e.g., from cleavage of the signal sequence) when fully processed and expressed.

TABLE 2
SEQ ID NOs of Amino Acid Sequences of Variable
and Constant Regions of HA-1 Specific TCRs

| | Alpha | | | Beta | | | |
|---|---|---|---|---|---|---|---|
| Exemplary | Variable | Constant | | Variable | Constant | | Full alpha- |
| TCR | (Vα) | (Cα) | Full | (Vβ) | (Cβ) | Full | P2A-beta |
| TCR A | 4 | 294 | 6 | 12 | 300 | 14 | 18 |
| TCR B | 22 | 294 | 24 | 28 | 298 | 30 | 34 |
| TCR C | 38 | 294 | 40 | 44 | 298 | 46 | 50 |
| TCR D | 52 | 294 | 54 | 58 | 300 | 60 | 64 |
| TCR E | 66 | 294 | 68 | 58 | 298 | 71 | 75 |
| TCR F | 79 | 296 | 81 | 85 | 300 | 87 | 91 |
| TCR G | 93 | 296 | 95 | 99 | 300 | 101 | 105 |
| TCR H | 107 | 294 | 109 | 113 | 300 | 115 | 119 |
| TCR I | 121 | 294 | 123 | 127 | 300 | 129 | 133 |
| TCR J | 137 | 294 | 139 | 143 | 300 | 145 | 149 |
| TCR K | 153 | 294 | 155 | 159 | 300 | 161 | 165 |
| TCR L | 167 | 294 | 169 | 173 | 298 | 175 | 179 |
| TCR M | 181 | 294 | 183 | 187 | 300 | 189 | 193 |
| TCR N | 195 | 296 | 197 | 201 | 300 | 203 | 207 |
| TCR O | 209 | 294 | 211 | 215 | 300 | 217 | 221 |
| TCR P | 225 | 294 | 227 | 231 | 300 | 233 | 237 |
| TCR Q | 239 | 296 | 241 | 245 | 298 | 247 | 251 |
| TCR R | 253 | 294 | 255 | 259 | 298 | 261 | 265 |
| TCR S | 269 | 296 | 271 | 159 | 300 | 161 | 277 |
| TCR T | 279 | 294 | 281 | 285 | 300 | 287 | 291 |
| TCR U | 360 | 294 | 362 | 364 | 300 | 366 | 367 |
| TCR V | 370 | 294 | 372 | 374 | 298 | 376 | 377 |
| TCR W | 380 | 294 | 382 | 384 | 300 | 386 | 387 |
| TCR X | 390 | 294 | 392 | 394 | 298 | 396 | 397 |
| TCR Y | 400 | 294 | 402 | 404 | 298 | 406 | 407 |
| TCR Z | 410 | 294 | 412 | 414 | 300 | 416 | 417 |
| TCR AA | 420 | 294 | 422 | 424 | 298 | 426 | 427 |
| TCR AB | 430 | 294 | 432 | 434 | 300 | 436 | 437 |
| TCR AC | 440 | 294 | 442 | 444 | 300 | 446 | 447 |
| TCR AD | 450 | 294 | 452 | 454 | 298 | 456 | 457 |
| TCR AJ | 481 | 294 | 483 | 485 | 298 | 487 | 488 |

[0142] In some of any of the embodiments provided herein, the alpha or gamma chain comprises SEQ ID NO:6, or a sequence that has at least 90% sequence identity thereto, and the beta or delta chain comprises SEQ ID NO:14, or a sequence that has at least 90% sequence identity thereto. In some of any of the embodiments provided herein, the alpha or gamma chain comprises SEQ ID NO:24, or a sequence that has at least 90% sequence identity thereto, and the beta or delta chain comprises SEQ ID NO:30, or a sequence that has at least 90% sequence identity thereto. In some of any of the embodiments provided herein, the alpha or gamma chain comprises SEQ ID NO:40, or a sequence that has at least 90% sequence identity thereto, and the beta or delta chain comprises SEQ ID NO:46, or a sequence that has at least 90% sequence identity thereto. In some of any of the embodiments provided herein, the alpha or gamma chain comprises SEQ ID NO:54, or a sequence that has at least 90% sequence identity thereto, and the beta or delta chain comprises SEQ ID NO:60, or a sequence that has at least 90% sequence identity thereto. In some of any of the embodiments provided herein, the alpha or gamma chain comprises SEQ ID NO:68, or a sequence that has at least 90% sequence identity thereto, and the beta or delta chain comprises SEQ ID NO:71, or a sequence that has at least 90% sequence identity thereto. In some of any of the embodiments provided herein, the alpha or gamma chain comprises SEQ ID NO:81, or a sequence that has at least 90% sequence identity thereto, and the beta or delta chain comprises SEQ ID NO:87, or a sequence that has at least 90% sequence identity thereto. In some of any of the embodiments provided herein, the alpha or gamma chain comprises SEQ ID NO:95, or a sequence that has at least 90% sequence identity thereto, and the beta or delta chain comprises SEQ ID NO:101, or a sequence that has at least 90% sequence identity thereto. In some of any of the embodiments provided herein, the alpha or gamma chain comprises SEQ ID NO: 109, or a sequence that has at least 90% sequence identity thereto, and the beta or delta chain comprises SEQ ID NO:115, or a sequence that has at least 90% sequence identity thereto. In some of any of the embodiments provided herein, the alpha or gamma chain comprises SEQ ID NO:123, or a sequence that has at least 90% sequence identity thereto, and the beta or delta chain comprises SEQ ID NO: 129, or a sequence that has at least 90% sequence identity thereto. In some of any of the embodiments provided herein, the alpha or gamma chain comprises SEQ ID NO:139, or a sequence that has at least 90% sequence identity thereto, and the beta or delta chain comprises SEQ ID NO:145, or a sequence that has at least 90% sequence identity thereto. In some of any of the embodiments provided herein, the alpha or gamma chain comprises SEQ ID NO:155, or a sequence that has at least 90% sequence identity thereto, and the beta or delta chain comprises SEQ ID NO: 161, or a sequence that has at least 90% sequence identity thereto. In some of any of the embodiments provided herein, the alpha or gamma chain comprises SEQ ID NO:169, or a sequence that has at least 90% sequence identity thereto, and the beta or delta chain comprises SEQ ID NO:175, or a sequence that has at least 90% sequence identity thereto. In some of any of the embodiments provided herein, the alpha or gamma chain comprises SEQ ID NO: 183, or a sequence that has at least 90% sequence identity thereto, and the beta or delta chain comprises SEQ ID NO:189, or a sequence that has at least 90% sequence identity thereto. In some of any of the embodiments provided herein, the alpha or gamma chain comprises SEQ ID NO:197, or a sequence that has at least 90% sequence identity thereto, and the beta or delta chain comprises SEQ ID NO:203, or a sequence that has at least 90% sequence identity thereto. In some of any of the embodiments provided herein, the alpha or gamma chain comprises SEQ ID NO:211, or a sequence that has at least 90% sequence identity thereto, and the beta or delta chain comprises SEQ ID NO:217, or a sequence that has at least 90% sequence identity thereto. In some of any of the embodiments provided herein, the alpha or gamma chain comprises SEQ ID NO:227, or a sequence that has at least 90% sequence identity thereto, and the beta or delta chain comprises SEQ ID NO:233, or a sequence that has at least 90% sequence identity thereto. In some of any of the embodiments provided herein, the alpha or gamma chain comprises SEQ ID NO:241, or a sequence that has at least 90% sequence identity thereto, and the beta or delta chain comprises SEQ ID NO:247, or a sequence that has at least 90% sequence identity thereto. In some of any of the embodiments provided herein, the alpha or gamma chain comprises SEQ ID NO:255, or a sequence that has at least 90% sequence identity thereto, and the beta or delta chain comprises SEQ ID NO:261, or a sequence that has at least 90% sequence identity thereto. In some of any of the embodiments provided herein, the alpha or gamma chain comprises SEQ ID NO:271, or a sequence that has at least 90% sequence identity thereto, and the beta or delta chain comprises SEQ ID NO: 161, or a sequence that has at least 90% sequence identity thereto. In some of any of the embodiments provided herein, the alpha or gamma chain comprises SEQ ID NO:281, or a sequence that has at least 90% sequence identity thereto, and the beta or delta chain comprises SEQ ID NO:287, or a sequence that has at least 90% sequence identity thereto. In some of any of the embodiments provided herein, the alpha or gamma chain comprises SEQ ID NO:362, or a sequence that has at least 90% sequence identity thereto, and the beta or delta chain comprises SEQ ID NO:366, or a sequence that has at least 90% sequence identity thereto. In some of any of the embodiments provided herein, the alpha or gamma chain comprises SEQ ID NO:372 or a sequence that has at least 90% sequence identity thereto, and the beta or delta chain comprises SEQ ID NO:376, or a sequence that has at least 90% sequence identity thereto. In some of any of the embodiments provided herein, the alpha or gamma chain comprises SEQ ID NO:382, or a sequence that has at least 90% sequence identity thereto, and the beta or delta chain comprises SEQ ID NO:386, or a sequence that has at least 90% sequence identity thereto. In some of any of the embodiments provided herein, the alpha or gamma chain comprises SEQ ID NO:392, or a sequence that has at least 90% sequence identity thereto, and the beta or delta chain comprises SEQ ID NO:396, or a sequence that has at least 90% sequence identity thereto. In some of any of the embodiments provided herein, the alpha or gamma chain comprises SEQ ID NO:402, or a sequence that has at least 90% sequence identity thereto, and the beta or delta chain comprises SEQ ID NO:406, or a sequence that has at least 90% sequence identity thereto. In some of any of the embodiments provided herein, the alpha or gamma chain comprises SEQ ID NO:412, or a sequence that has at least 90% sequence identity thereto, and the beta or delta chain comprises SEQ ID NO:416, or a sequence that has at least 90% sequence identity thereto. In some of any of the embodiments provided herein, the alpha or gamma chain comprises SEQ ID NO:422, or a sequence that has at least 90% sequence identity thereto, and the beta or delta chain comprises SEQ ID NO:426, or a sequence that has at least 90% sequence identity thereto. In some of any of the embodiments provided herein, the alpha or gamma chain comprises SEQ ID NO:432, or a sequence that has at least 90% sequence identity thereto, and the beta or delta chain comprises SEQ ID NO:436, or a sequence that has at least 90% sequence identity thereto. In some of any of the embodiments provided herein, the alpha or gamma chain comprises SEQ ID NO:442, or a sequence that has at least 90% sequence identity thereto, and the beta or delta chain comprises SEQ ID NO:446, or a sequence that has at least 90% sequence identity thereto. In some of any of the embodiments provided herein, the alpha or gamma chain comprises SEQ ID NO:452, or a sequence that has at least 90% sequence identity thereto, and the beta or delta chain comprises SEQ ID NO:456, or a sequence that has at least 90% sequence identity thereto. In some of any of the embodiments provided herein, the alpha or gamma chain comprises SEQ ID NO:483, or a sequence that has at least 90% sequence identity thereto, and the beta or delta chain comprises SEQ ID NO:487, or a sequence that has at least 90% sequence identity thereto.

[0143] In some of any of the embodiments provided herein, the alpha chain comprises SEQ ID NO:6, and the beta chain comprises SEQ ID NO:14. In some of any of the embodiments provided herein, the alpha chain comprises SEQ ID NO:24, and the beta chain comprises SEQ ID NO:30. In some of any of the embodiments provided herein, the alpha chain comprises SEQ ID NO:40, and the beta chain comprises SEQ ID NO:46. In some of any of the embodiments provided herein, the alpha chain comprises SEQ ID NO:54, and the beta chain comprises SEQ ID NO:60. In some of any of the embodiments provided herein, the alpha chain comprises SEQ ID NO:68, and the beta chain comprises SEQ ID NO:71. In some of any of the embodiments provided herein, the alpha chain comprises SEQ ID NO:81, and the beta chain comprises SEQ ID NO:87. In some of any of the embodiments provided herein, the alpha chain comprises SEQ ID NO:95, and the beta chain comprises SEQ ID NO: 101. In some of any of the embodiments provided herein, the alpha chain comprises SEQ ID NO: 109, and the beta chain comprises SEQ ID NO:115. In some of any of the embodiments provided herein, the alpha chain comprises SEQ ID NO: 123, and the beta chain comprises SEQ ID NO: 129. In some of any of the embodiments provided herein, the alpha chain comprises SEQ ID NO:139, and the beta chain comprises SEQ ID NO: 145. In some of any of the embodiments provided herein, the alpha chain comprises SEQ ID NO:155, and the beta chain comprises SEQ ID NO: 161. In some of any of the embodiments provided herein, the alpha chain comprises SEQ ID NO:169, and the beta chain comprises SEQ ID NO:175. In some of any of the embodiments provided herein, the alpha chain comprises SEQ ID NO: 183, and the beta chain comprises SEQ ID NO: 189. In some of any of the embodiments provided herein, the alpha chain comprises SEQ ID NO:197, and the beta chain comprises SEQ ID NO:203. In some of any of the embodiments provided herein, the alpha chain comprises SEQ ID NO:211, and the beta chain comprises SEQ ID NO:217. In some of any of the embodiments provided herein, the alpha chain comprises SEQ ID NO:227, and the beta chain comprises SEQ ID NO:233. In some of any of the embodiments provided herein, the alpha chain comprises SEQ ID NO:241, and the beta chain comprises SEQ ID NO:247. In some of any of the embodiments provided herein, the alpha chain comprises SEQ ID NO:255, and the beta chain comprises SEQ ID NO:261. In some of any of the embodiments provided herein, the alpha chain comprises SEQ ID NO:271, and the beta chain comprises SEQ ID NO: 161. In some of any of the embodiments provided herein, the alpha chain comprises SEQ ID NO:281, and the beta chain comprises SEQ ID NO:287. In some of any of the embodiments provided herein, the alpha or gamma chain comprises SEQ ID NO:362, and the beta or delta chain comprises SEQ ID NO:366. In some of any of the embodiments provided herein, the alpha or gamma chain comprises SEQ ID NO:372, and the beta or delta chain comprises SEQ ID NO:376. In some of any of the embodiments provided herein, the alpha or gamma chain comprises SEQ ID NO:382, and the beta or delta chain comprises SEQ ID NO:386. In some of any of the embodiments provided herein, the alpha or gamma chain comprises SEQ ID NO:392, and the beta or delta chain comprises SEQ ID NO:396. In some of any of the embodiments provided herein, the alpha or gamma chain comprises SEQ ID NO:402, and the beta or delta chain comprises SEQ ID NO:406. In some of any of the embodiments provided herein, the alpha or gamma chain comprises SEQ ID NO:412, and the beta or delta chain comprises SEQ ID NO:416. In some of any of the embodiments provided herein, the alpha or gamma chain comprises SEQ ID NO:422, and the beta or delta chain comprises SEQ ID NO:426. In some of any of the embodiments provided herein, the alpha or gamma chain comprises SEQ ID NO:432, and the beta or delta chain comprises SEQ ID NO:436. In some of any of the embodiments provided herein, the alpha or gamma chain comprises SEQ ID NO:442, and the beta or delta chain comprises SEQ ID NO:446. In some of any of the embodiments provided herein, the alpha or gamma chain comprises SEQ ID NO:452, and the beta or delta chain comprises SEQ ID NO:456. In some of any of the embodiments provided herein, the alpha or gamma chain comprises SEQ ID NO:483, and the beta or delta chain comprises SEQ ID NO:487.

### II. Nucleic Acids Encoding a Tcr

[0144] Also provided herein are nucleic acids, such as polynucleotides or nucleic acid molecules, encoding any of the provided TCRs or antigen-binding fragments thereof. The nucleic acids may include those encompassing natural and/or non-naturally occurring nucleotides and bases, e.g., including those with backbone modifications. The terms “nucleic acid molecule,” “nucleic acid,” and “polynucleotide” may be used interchangeably, and refer to a polymer of nucleotides. Such polymers of nucleotides may contain natural and/or non-natural nucleotides, and include, but are not limited to, DNA, RNA, and PNA. “Nucleic acid sequence” refers to the linear sequence of nucleotides that comprise the nucleic acid molecule or polynucleotide.

[0145] In some embodiments, a TCR or antigen binding portion thereof provided herein may be a recombinantly produced natural protein or mutated form thereof in which one or more properties, such as a binding characteristic, has been altered. In some aspects, the nucleic acid is synthetic. In some cases, the nucleic acid is or contains cDNA. In some aspects, the polynucleotide can be modified for use in a construct described herein, such as for codon optimization. In some cases, the sequences can be designed to contain terminal restriction site sequences for purposes of cloning into vectors.

[0146] In some embodiments, a TCR or antigen-binding portion thereof provided herein can be synthetically generated from knowledge of the sequence of the TCR.

[0147] In some embodiments, the polynucleotide contains a nucleic acid sequence encoding an alpha chain and/or a nucleotide sequence encoding a beta chain. In some embodiments, the polynucleotide contains a nucleic acid sequence encoding a gamma chain and/or a nucleotide sequence encoding a delta chain.

[0148] In some embodiments, the nucleotide sequence encoding the alpha or gamma chain and/or the nucleotide sequence encoding the beta or delta chain, or any domains, regions or portion thereof, is codon-optimized. Typically, codon optimization involves balancing the percentages of codons selected with the published abundance of human transfer RNAs so that none is overloaded or limiting. This may be necessary in some cases because most amino acids are encoded by more than one codon, and codon usage varies from organism to organism. Differences in codon usage between transfected genes and host cells can have effects on protein expression and immunogenicity of a nucleic acid construct. In general, for codon optimization, codons are chosen to select for those codons that are in balance with human usage frequency. Typically, the redundancy of the codons for amino acids is such that different codons code for one amino acid. In some embodiments, in selecting a codon for replacement, it may be desired that the resulting mutation is a silent mutation such that the codon change does not affect the amino acid sequence. Generally, the last nucleotide of the codon can be changed without affecting the amino acid sequence.

[0149] In some of any of the embodiments provided herein, the nucleotide sequence encoding the Vα region comprises SEQ ID NO:7 or a sequence that has at least 90% sequence identity thereto, and the nucleotide sequence encoding the Vβ region comprises SEQ ID NO: 15 or a sequence that has at least 90% sequence identity thereto. In some of any of the embodiments provided herein, the nucleotide sequence encoding the Vα region comprises SEQ ID NO:25 or a sequence that has at least 90% sequence identity thereto, and the nucleotide sequence encoding the Vβ region comprises SEQ ID NO:31 or a sequence that has at least 90% sequence identity thereto. In some of any of the embodiments provided herein, the nucleotide sequence encoding the Vα region comprises SEQ ID NO:41 or a sequence that has at least 90% sequence identity thereto, and the nucleotide sequence encoding the Vβ region comprises SEQ ID NO:47 or a sequence that has at least 90% sequence identity thereto. In some of any of the embodiments provided herein, the nucleotide sequence encoding the Vα region comprises SEQ ID NO:55 or a sequence that has at least 90% sequence identity thereto, and the nucleotide sequence encoding the Vβ region comprises SEQ ID NO:61 or a sequence that has at least 90% sequence identity thereto. In some of any of the embodiments provided herein, the nucleotide sequence encoding the Vα region comprises SEQ ID NO:69 or a sequence that has at least 90% sequence identity thereto, and the nucleotide sequence encoding the Vβ region comprises SEQ ID NO:72 or a sequence that has at least 90% sequence identity thereto. In some of any of the embodiments provided herein, the nucleotide sequence encoding the Vα region comprises SEQ ID NO:82 or a sequence that has at least 90% sequence identity thereto, and the nucleotide sequence encoding the Vβ region comprises SEQ ID NO:88 or a sequence that has at least 90% sequence identity thereto. In some of any of the embodiments provided herein, the nucleotide sequence encoding the Vα region comprises SEQ ID NO:96 or a sequence that has at least 90% sequence identity thereto, and the nucleotide sequence encoding the Vβ region comprises SEQ ID NO:102 or a sequence that has at least 90% sequence identity thereto. In some of any of the embodiments provided herein, the nucleotide sequence encoding the Vα region comprises SEQ ID NO:110 or a sequence that has at least 90% sequence identity thereto, and the nucleotide sequence encoding the Vβ region comprises SEQ ID NO: 116 or a sequence that has at least 90% sequence identity thereto. In some of any of the embodiments provided herein, the nucleotide sequence encoding the Vα region comprises SEQ ID NO:124 or a sequence that has at least 90% sequence identity thereto, and the nucleotide sequence encoding the Vβ region comprises SEQ ID NO:130 or a sequence that has at least 90% sequence identity thereto. In some of any of the embodiments provided herein, the nucleotide sequence encoding the Vα region comprises SEQ ID NO:140 or a sequence that has at least 90% sequence identity thereto, and the nucleotide sequence encoding the Vβ region comprises SEQ ID NO:146 or a sequence that has at least 90% sequence identity thereto. In some of any of the embodiments provided herein, the nucleotide sequence encoding the Vα region comprises SEQ ID NO:156 or a sequence that has at least 90% sequence identity thereto, and the nucleotide sequence encoding the Vβ region comprises SEQ ID NO: 162 or a sequence that has at least 90% sequence identity thereto. In some of any of the embodiments provided herein, the nucleotide sequence encoding the Vα region comprises SEQ ID NO: 170 or a sequence that has at least 90% sequence identity thereto, and the nucleotide sequence encoding the Vβ region comprises SEQ ID NO: 176 or a sequence that has at least 90% sequence identity thereto. In some of any of the embodiments provided herein, the nucleotide sequence encoding the Vα region comprises SEQ ID NO:184 or a sequence that has at least 90% sequence identity thereto, and the nucleotide sequence encoding the Vβ region comprises SEQ ID NO: 190 or a sequence that has at least 90% sequence identity thereto. In some of any of the embodiments provided herein, the nucleotide sequence encoding the Vα region comprises SEQ ID NO:198 or a sequence that has at least 90% sequence identity thereto, and the nucleotide sequence encoding the Vβ region comprises SEQ ID NO:204 or a sequence that has at least 90% sequence identity thereto. In some of any of the embodiments provided herein, the nucleotide sequence encoding the Vα region comprises SEQ ID NO:212 or a sequence that has at least 90% sequence identity thereto, and the nucleotide sequence encoding the Vβ region comprises SEQ ID NO:218 or a sequence that has at least 90% sequence identity thereto. In some of any of the embodiments provided herein, the nucleotide sequence encoding the Vα region comprises SEQ ID NO:228 or a sequence that has at least 90% sequence identity thereto, and the nucleotide sequence encoding the Vβ region comprises SEQ ID NO:234 or a sequence that has at least 90% sequence identity thereto. In some of any of the embodiments provided herein, the nucleotide sequence encoding the Vα region comprises SEQ ID NO:242 or a sequence that has at least 90% sequence identity thereto, and the nucleotide sequence encoding the Vβ region comprises SEQ ID NO:248 or a sequence that has at least 90% sequence identity thereto. In some of any of the embodiments provided herein, the nucleotide sequence encoding the Vα region comprises SEQ ID NO:256 or a sequence that has at least 90% sequence identity thereto, and the nucleotide sequence encoding the Vβ region comprises SEQ ID NO:262 or a sequence that has at least 90% sequence identity thereto. In some of any of the embodiments provided herein, the nucleotide sequence encoding the Vα region comprises SEQ ID NO:272 or a sequence that has at least 90% sequence identity thereto, and the nucleotide sequence encoding the Vβ region comprises SEQ ID NO:274 or a sequence that has at least 90% sequence identity thereto. In some of any of the embodiments provided herein, the nucleotide sequence encoding the Vα region comprises SEQ ID NO:282 or a sequence that has at least 90% sequence identity thereto, and the nucleotide sequence encoding the Vβ region comprises SEQ ID NO:288 or a sequence that has at least 90% sequence identity thereto.

[0150] In some of any of the embodiments provided herein, the nucleotide sequence encoding the alpha or gamma chain comprises SEQ ID NO:8, and the nucleotide sequence encoding the beta or delta chain comprises SEQ ID NO:16. In some of any of the embodiments provided herein, the nucleotide sequence encoding the alpha or gamma chain comprises SEQ ID NO:26, and the nucleotide sequence encoding the beta or delta chain comprises SEQ ID NO:32. In some of any of the embodiments provided herein, the nucleotide sequence encoding the alpha or gamma chain comprises SEQ ID NO:42, and the nucleotide sequence encoding the beta or delta chain comprises SEQ ID NO:48. In some of any of the embodiments provided herein, the nucleotide sequence encoding the alpha or gamma chain comprises SEQ ID NO:56, and the nucleotide sequence encoding the beta or delta chain comprises SEQ ID NO:62. In some of any of the embodiments provided herein, the nucleotide sequence encoding the alpha or gamma chain comprises SEQ ID NO:70, and the nucleotide sequence encoding the beta or delta chain comprises SEQ ID NO:73. In some of any of the embodiments provided herein, the nucleotide sequence encoding the alpha or gamma chain comprises SEQ ID NO:83, and the nucleotide sequence encoding the beta or delta chain comprises SEQ ID NO:89. In some of any of the embodiments provided herein, the nucleotide sequence encoding the alpha or gamma chain comprises SEQ ID NO:97, and the nucleotide sequence encoding the beta or delta chain comprises SEQ ID NO:103. In some of any of the embodiments provided herein, the nucleotide sequence encoding the alpha or gamma chain comprises SEQ ID NO: 111, and the nucleotide sequence encoding the beta or delta chain comprises SEQ ID NO: 117. In some of any of the embodiments provided herein, the nucleotide sequence encoding the alpha or gamma chain comprises SEQ ID NO:125, and the nucleotide sequence encoding the beta or delta chain comprises SEQ ID NO:131. In some of any of the embodiments provided herein, the nucleotide sequence encoding the alpha or gamma chain comprises SEQ ID NO:141, and the nucleotide sequence encoding the beta or delta chain comprises SEQ ID NO:147. In some of any of the embodiments provided herein, the nucleotide sequence encoding the alpha or gamma chain comprises SEQ ID NO:157, and the nucleotide sequence encoding the beta or delta chain comprises SEQ ID NO: 163. In some of any of the embodiments provided herein, the nucleotide sequence encoding the alpha or gamma chain comprises SEQ ID NO:171, and the nucleotide sequence encoding the beta or delta chain comprises SEQ ID NO: 177. In some of any of the embodiments provided herein, the nucleotide sequence encoding the alpha or gamma chain comprises SEQ ID NO:185, and the nucleotide sequence encoding the beta or delta chain comprises SEQ ID NO:191. In some of any of the embodiments provided herein, the nucleotide sequence encoding the alpha or gamma chain comprises SEQ ID NO:199, and the nucleotide sequence encoding the beta or delta chain comprises SEQ ID NO:205. In some of any of the embodiments provided herein, the nucleotide sequence encoding the alpha or gamma chain comprises SEQ ID NO:213, and the nucleotide sequence encoding the beta or delta chain comprises SEQ ID NO:219. In some of any of the embodiments provided herein, the nucleotide sequence encoding the alpha or gamma chain comprises SEQ ID NO:229, and the nucleotide sequence encoding the beta or delta chain comprises SEQ ID NO:235. In some of any of the embodiments provided herein, the nucleotide sequence encoding the alpha or gamma chain comprises SEQ ID NO:243, and the nucleotide sequence encoding the beta or delta chain comprises SEQ ID NO:249. In some of any of the embodiments provided herein, the nucleotide sequence encoding the alpha or gamma chain comprises SEQ ID NO:257, and the nucleotide sequence encoding the beta or delta chain comprises SEQ ID NO:263. In some of any of the embodiments provided herein, the nucleotide sequence encoding the alpha or gamma chain comprises SEQ ID NO:273, and the nucleotide sequence encoding the beta or delta chain comprises SEQ ID NO:275. In some of any of the embodiments provided herein, the nucleotide sequence encoding the alpha or gamma chain comprises SEQ ID NO:283, and the nucleotide sequence encoding the beta or delta chain comprises SEQ ID NO:289.

[0151] In some of any of the embodiments provided herein, the nucleotide sequence encoding the Vα region comprises SEQ ID NO:301, and the nucleotide sequence encoding the Vβ region comprises SEQ ID NO:321. In some of any of the embodiments provided herein, the nucleotide sequence encoding the Vα region comprises SEQ ID NO:302, and the nucleotide sequence encoding the Vβ region comprises SEQ ID NO:322. In some of any of the embodiments provided herein, the nucleotide sequence encoding the Vα region comprises SEQ ID NO:303, and the nucleotide sequence encoding the Vβ region comprises SEQ ID NO:323. In some of any of the embodiments provided herein, the nucleotide sequence encoding the Vα region comprises SEQ ID NO:304, and the nucleotide sequence encoding the Vβ region comprises SEQ ID NO:324. In some of any of the embodiments provided herein, the nucleotide sequence encoding the Vα region comprises SEQ ID NO:305, and the nucleotide sequence encoding the Vβ region comprises SEQ ID NO:325. In some of any of the embodiments provided herein, the nucleotide sequence encoding the Vα region comprises SEQ ID NO:306, and the nucleotide sequence encoding the Vβ region comprises SEQ ID NO:326. In some of any of the embodiments provided herein, the nucleotide sequence encoding the Vα region comprises SEQ ID NO:307, and the nucleotide sequence encoding the Vβ region comprises SEQ ID NO:327. In some of any of the embodiments provided herein, the nucleotide sequence encoding the Vα region comprises SEQ ID NO:308, and the nucleotide sequence encoding the Vβ region comprises SEQ ID NO:328. In some of any of the embodiments provided herein, the nucleotide sequence encoding the Vα region comprises SEQ ID NO:309, and the nucleotide sequence encoding the Vβ region comprises SEQ ID NO:329. In some of any of the embodiments provided herein, the nucleotide sequence encoding the Vα region comprises SEQ ID NO:310, and the nucleotide sequence encoding the Vβ region comprises SEQ ID NO:330. In some of any of the embodiments provided herein, the nucleotide sequence encoding the Vα region comprises SEQ ID NO:311, and the nucleotide sequence encoding the Vβ region comprises SEQ ID NO:331. In some of any of the embodiments provided herein, the nucleotide sequence encoding the Vα region comprises SEQ ID NO:312, and the nucleotide sequence encoding the Vβ region comprises SEQ ID NO:332. In some of any of the embodiments provided herein, the nucleotide sequence encoding the Vα region comprises SEQ ID NO:313, and the nucleotide sequence encoding the Vβ region comprises SEQ ID NO:333. In some of any of the embodiments provided herein, the nucleotide sequence encoding the Vα region comprises SEQ ID NO:314, and the nucleotide sequence encoding the Vβ region comprises SEQ ID NO:334. In some of any of the embodiments provided herein, the nucleotide sequence encoding the Vα region comprises SEQ ID NO:315, and the nucleotide sequence encoding the Vβ region comprises SEQ ID NO:335. In some of any of the embodiments provided herein, the nucleotide sequence encoding the Vα region comprises SEQ ID NO:316, and the nucleotide sequence encoding the Vβ region comprises SEQ ID NO:336. In some of any of the embodiments provided herein, the nucleotide sequence encoding the Vα region comprises SEQ ID NO:317, and the nucleotide sequence encoding the Vβ region comprises SEQ ID NO:337. In some of any of the embodiments provided herein, the nucleotide sequence encoding the Vα region comprises SEQ ID NO:318, and the nucleotide sequence encoding the Vβ region comprises SEQ ID NO:338. In some of any of the embodiments provided herein, the nucleotide sequence encoding the Vα region comprises SEQ ID NO:319, and the nucleotide sequence encoding the Vβ region comprises SEQ ID NO:339. In some of any of the embodiments provided herein, the nucleotide sequence encoding the Vα region comprises SEQ ID NO:320, and the nucleotide sequence encoding the Vβ region comprises SEQ ID NO:340.

[0152] In some embodiments, the nucleic acid sequence encoding the alpha or gamma chain comprises one of the following: SEQ ID NO: 8, 26, 42, 56, 70, 83, 97, 111, 125, 141, 157, 171, 185, 199, 213, 229, 243, 257, 273, or 283, a degenerate sequence thereof or a sequence having at least 90%, 91%, 92%, 93%, 94%, 95%, 96%, 97%, 98%, 99% or more sequence identity thereto. In some aspects, the nucleotide sequence encoding the beta or delta chain comprises one of the following: SEQ ID NO: 16, 32, 48, 62, 73, 89, 103, 117, 131, 147, 163, 177, 191, 205, 219, 235, 249, 263, 275, or 289, a degenerate sequence thereof or a sequence having at least 90%, 91%, 92%, 93%, 94%, 95%, 96%, 97%, 98%, 99% or more sequence identity thereto.

[0153] In some of any of the embodiments provided herein, the nucleotide sequence encoding the alpha chain comprises SEQ ID NO:8, and the nucleotide sequence encoding the beta chain comprises SEQ ID NO:16. In some of any of the embodiments provided herein, the nucleotide sequence encoding the alpha chain comprises SEQ ID NO:26, and the nucleotide sequence encoding the beta chain comprises SEQ ID NO:32. In some of any of the embodiments provided herein, the nucleotide sequence encoding the alpha chain comprises SEQ ID NO:42, and the nucleotide sequence encoding the beta chain comprises SEQ ID NO:48. In some of any of the embodiments provided herein, the nucleotide sequence encoding the alpha chain comprises SEQ ID NO:56, and the nucleotide sequence encoding the beta chain comprises SEQ ID NO:62. In some of any of the embodiments provided herein, the nucleotide sequence encoding the alpha chain comprises SEQ ID NO:70, and the nucleotide sequence encoding the beta chain comprises SEQ ID NO:73. In some of any of the embodiments provided herein, the nucleotide sequence encoding the alpha chain comprises SEQ ID NO:83, and the nucleotide sequence encoding the beta chain comprises SEQ ID NO:89. In some of any of the embodiments provided herein, the nucleotide sequence encoding the alpha chain comprises SEQ ID NO:97, and the nucleotide sequence encoding the beta chain comprises SEQ ID NO: 103. In some of any of the embodiments provided herein, the nucleotide sequence encoding the alpha chain comprises SEQ ID NO:111, and the nucleotide sequence encoding the beta chain comprises SEQ ID NO:117. In some of any of the embodiments provided herein, the nucleotide sequence encoding the alpha chain comprises SEQ ID NO:125, and the nucleotide sequence encoding the beta chain comprises SEQ ID NO: 131. In some of any of the embodiments provided herein, the nucleotide sequence encoding the alpha chain comprises SEQ ID NO: 141, and the nucleotide sequence encoding the beta chain comprises SEQ ID NO: 147. In some of any of the embodiments provided herein, the nucleotide sequence encoding the alpha chain comprises SEQ ID NO:157, and the nucleotide sequence encoding the beta chain comprises SEQ ID NO:163. In some of any of the embodiments provided herein, the nucleotide sequence encoding the alpha chain comprises SEQ ID NO:171, and the nucleotide sequence encoding the beta chain comprises SEQ ID NO: 177. In some of any of the embodiments provided herein, the nucleotide sequence encoding the alpha chain comprises SEQ ID NO:185, and the nucleotide sequence encoding the beta chain comprises SEQ ID NO: 191. In some of any of the embodiments provided herein, the nucleotide sequence encoding the alpha chain comprises SEQ ID NO:199, and the nucleotide sequence encoding the beta chain comprises SEQ ID NO:205. In some of any of the embodiments provided herein, the nucleotide sequence encoding the alpha chain comprises SEQ ID NO:213, and the nucleotide sequence encoding the beta chain comprises SEQ ID NO:219. In some of any of the embodiments provided herein, the nucleotide sequence encoding the alpha chain comprises SEQ ID NO:229, and the nucleotide sequence encoding the beta chain comprises SEQ ID NO:235. In some of any of the embodiments provided herein, the nucleotide sequence encoding the alpha chain comprises SEQ ID NO:243, and the nucleotide sequence encoding the beta chain comprises SEQ ID NO:249. In some of any of the embodiments provided herein, the nucleotide sequence encoding the alpha chain comprises SEQ ID NO:257, and the nucleotide sequence encoding the beta chain comprises SEQ ID NO:263. In some of any of the embodiments provided herein, the nucleotide sequence encoding the alpha chain comprises SEQ ID NO:273, and the nucleotide sequence encoding the beta chain comprises SEQ ID NO:275. In some of any of the embodiments provided herein, the nucleotide sequence encoding the alpha chain comprises SEQ ID NO:283, and the nucleotide sequence encoding the beta chain comprises SEQ ID NO:289. Also among the provided nucleic acid(s) or polynucleotides provided herein are those containing sequences at least at or about 90%, 91%, 92%, 93%, 94%, 95%, 96%, 97%, 98%, or 99% identical to such sequences. Also among the provided embodiments are one or more chains (e.g., alpha or gamma chain and/or beta or delta chain) of a TCR or a binding fragment thereof encoded by any of such polynucleotides.

[0154] In some embodiments, the alpha or gamma chain and/or beta or delta chain of the TCR is encoded by a sequence of nucleotides comprising a signal peptide (also called a leader sequence). Non-limiting examples of such a signal peptide are signal peptides that have or comprise the sequence of amino acids set forth in any of SEQ ID NOs: 341-350.

[0155] In some embodiments, the nucleic acid encoding the alpha or gamma chain and the nucleic acid encoding the beta or delta chain can be connected via a linker, such as any described elsewhere herein.

[0156] In some embodiments, the nucleic acid encoding the alpha or gamma chain and the nucleic acid encoding the beta or delta chain can be connected via a cleavable linker sequence or a peptide that causes ribosome skipping (e.g. T2A or P2A), such as any described elsewhere herein.

[0157] Also provided herein are vectors or constructs containing such nucleotide sequences. In some embodiments, the vectors or constructs contain one or more promoters operatively linked to the nucleotide encoding the alpha or gamma chain and/or the beta or delta chain. In some embodiments, the promoter is operatively linked to one or more than one nucleotide sequence.

[0158] In some embodiments, the vector or construct can contain a single promoter that drives the expression of one or more nucleotide sequences. In some embodiments, such promoters can be multicistronic (e.g., bicistronic or tricistronic, see e.g., U.S. Pat. No. 6,060,273). For example, in some embodiments, transcription units can be engineered as a bicistronic unit containing an IRES (internal ribosome entry site), which allows coexpression of gene products (e.g. encoding an alpha or gamma chain and/or a beta or delta chain of a TCR) by a message from a single promoter. Alternatively, in some cases, a single promoter may direct expression of an RNA that contains, in a single open reading frame (ORF), two or three genes (e.g. encoding an alpha or gamma chain and/or a beta or delta chain of a TCR) separated from one another by sequences encoding a self-cleavage peptide (e.g., P2A) or a protease recognition site (e.g., furin). The ORF thus encodes a single polyprotein, which, either during (in the case of 2A e.g., P2A) or after translation, is cleaved into the individual proteins. In some cases, the peptide, such as P2A, can cause the ribosome to skip (ribosome skipping) synthesis of a peptide bond at the C-terminus of a 2A element, leading to separation between the end of the 2A sequence and the next peptide downstream (see, for example, de Felipe. Genetic Vaccines and Ther. 2:13 (2004) and deFelipe et al. Traffic 5:616-626 (2004)). Examples of 2A cleavage peptides, including those that can induce ribosome skipping, are Thosea asigna virus (T2A), porcine teschovirus-1 (P2A, e.g., SEQ ID NO: 352), equine rhinitis A virus (E2A), and 2A sequences from the foot-and-mouth disease virus (F2A) as described in U.S. Patent Publication No. 2007/0116690. In some such instances, the peptide that causes ribosome skipping is a P2A peptide and/or contains the sequence of amino acids set forth in SEQ ID NO:352.

[0159] In some embodiments, the nucleic acid sequence encoding the alpha or gamma chain and the nucleotide sequence encoding the beta or delta chain are present in any order, separated by the nucleotide sequence encoding a peptide sequence that causes ribosome skipping. For example, in some embodiments, the nucleotide sequence comprises a nucleic acid sequence encoding a beta or delta chain, a nucleic acid sequence encoding a peptide sequence that causes ribosome skipping, e.g., a P2A sequence as described herein, and a nucleic acid sequence that encodes an alpha or gamma chain, in that order. In other embodiments, the nucleotide sequence contains a nucleic acid sequence that encodes an alpha or gamma chain, a nucleic acid sequence that encodes a peptide sequence that causes ribosome skipping, e.g., a P2A sequence as described herein, and a nucleic acid sequence that encodes a beta or delta chain, in that order.

[0160] In some embodiments, the nucleotide sequence encoding an alpha or gamma chain and/or a beta or delta chain of a TCR comprises a nucleic acid sequence corresponding to a SEQ ID NO: set forth in Table 3. Also among the provided nucleotide sequences encoding a TCR are those containing sequences at least at or about 90%, 91%, 92%, 93%, 94%, 95%, 96%, 97%, 98%, or 99% identical to such sequences. Also provided are any of the mature TCR alpha or gamma chains encoded by any of the sequences set forth in Table 3, such as in each row therein. Also provided are any of the mature TCR beta or delta chains encoded by any of the sequences set forth in Table 3, such as in each row therein. Also provided are any of the mature TCR alpha and beta chains, or mature gamma and delta chains, encoded by any of the sequences set forth in Table 3, such as in each row therein. In some aspects, the nucleotide sequences contain sequences encoding a signal sequence, and the encoded exemplary TCRs, when expressed as a mature protein, comprise the mature Vα and/or mature Vβ region, or the mature Vγ and/or Vδ mature region, for example, without the signal sequence (e.g., from cleavage of the signal sequence) when fully processed and expressed.

[0161] In some embodiments, the nucleotide sequence encodes a polypeptide containing an amino acid sequence set forth in Table 3, such as in each row therein, or a sequence having at least 90%, 91%, 92%, 93%, 94%, 95%, 96%, 97%, 98%, or 99% sequence identity thereto. In some embodiments, the nucleotide sequence encodes a mature polypeptide set forth herein, for example, in Table 3, such as in each row therein, or a sequence having at least 90%, 91%, 92%, 93%, 94%, 95%, 96%, 97%, 98%, or 99% sequence identity thereto.

TABLE 3
SEQ ID NOs of Nucleotide Sequences of HA-1 Specific TCRs

| | Alpha | | | | Beta | | | | |
|---|---|---|---|---|---|---|---|---|---|
| | | Vα | | | | Vβ | | | |
| | | (nt) | | Vα + | | (nt) | | Vβ + | |
| | Vα | codon | Cα | Cα | Vβ | codon | Cβ | Cβ | alpha-P2A- |
| TCR | (nt) | opt. | (nt) | (nt) | (nt) | opt. | (nt) | (nt) | beta |
| TCR A | 7 | 301 | 293 | 8 | 15 | 321 | 299 | 16 | 17 |
| TCR B | 25 | 302 | 293 | 26 | 31 | 322 | 297 | 32 | 33 |
| TCR C | 41 | 303 | 293 | 42 | 47 | 323 | 297 | 48 | 49 |
| TCR D | 55 | 304 | 293 | 56 | 61 | 324 | 299 | 62 | 63 |
| TCR E | 69 | 305 | 293 | 70 | 72 | 325 | 297 | 73 | 74 |
| TCR F | 82 | 306 | 295 | 83 | 88 | 326 | 299 | 89 | 90 |
| TCR G | 96 | 307 | 295 | 97 | 102 | 327 | 299 | 103 | 104 |
| TCR H | 110 | 308 | 293 | 111 | 116 | 328 | 299 | 117 | 118 |
| TCR I | 124 | 309 | 293 | 125 | 130 | 329 | 299 | 131 | 132 |
| TCR J | 140 | 310 | 293 | 141 | 146 | 330 | 299 | 147 | 148 |
| TCR K | 156 | 311 | 293 | 157 | 162 | 331 | 299 | 163 | 164 |
| TCR L | 170 | 312 | 293 | 171 | 176 | 332 | 297 | 177 | 178 |
| TCR M | 184 | 313 | 293 | 185 | 190 | 333 | 299 | 191 | 192 |
| TCR N | 198 | 314 | 295 | 199 | 204 | 334 | 299 | 205 | 206 |
| TCR O | 212 | 315 | 293 | 213 | 218 | 335 | 299 | 219 | 220 |
| TCR P | 228 | 316 | 293 | 229 | 234 | 336 | 299 | 235 | 236 |
| TCR Q | 242 | 317 | 295 | 243 | 248 | 337 | 297 | 249 | 250 |
| TCR R | 256 | 318 | 293 | 257 | 262 | 338 | 297 | 263 | 264 |
| TCR S | 272 | 319 | 295 | 273 | 274 | 339 | 299 | 275 | 276 |
| TCR T | 282 | 320 | 293 | 283 | 288 | 340 | 299 | 289 | 290 |
| TCR U | | | | | | | | | 368 |
| TCR V | | | | | | | | | 378 |
| TCR W | | | | | | | | | 388 |
| TCR X | | | | | | | | | 398 |
| TCR Y | | | | | | | | | 408 |
| TCR Z | | | | | | | | | 418 |
| TCR AA | | | | | | | | | 428 |
| TCR AB | | | | | | | | | 438 |
| TCR AC | | | | | | | | | 448 |
| TCR AD | | | | | | | | | 458 |
| TCR AJ | | | | | | | | | 489 |

[0162] The nucleic acid may encode an amino acid sequence comprising the Vα region of the TCR. In some cases, the nucleic acid encodes an amino acid sequence comprising the Vβ region of the TCR. In a further embodiment, one or more vectors (e.g., expression vectors) comprising such nucleic acid are provided.

[0163] Also provided herein are vectors, such as those containing any of the nucleic acids described herein. In some embodiments, nucleic acid or nucleic acids encoding one or both chains of a TCR, are cloned or assembled into a suitable expression vector or vectors. The expression vector can be any suitable recombinant expression vector, and can be used to transform or transfect any suitable host. Suitable vectors include those designed for propagation and expansion or for expression or both, such as plasmids and viruses. In some embodiments, the vector is an expression vector.

### III. Methods for Isolating, Assessing and Identifying T Cell Receptors

[0164] In some aspects, provided herein are methods for isolating a plurality of nucleic acid sequences encoding the provided TCRs specific for a minor histocompatibility antigen. In some aspects, the provided HA-1 specific TCRs are identified based on the methods described herein. In some aspects, the methods also include isolating nucleic acid sequences, assembling the nucleic acid sequences into vectors, assessing the expression and/or activity of the TCRs, and screening and identifying particular TCRs of interest, in some cases, using a high-throughput method.

[0165] The methods described herein also relate to determining the binding activity and functional capacity of candidate TCRs.

A. Donor Criteria and Methods for Isolating miHA-Specific T Cell Candidates

[0166] Alloreactive T cells have been isolated from patients who have undergone an alloSCT. However, such patients frequently have few circulating T cells, undergo immunosuppressive treatments, and may have other alloSCT-related illnesses that could compromise aspects of donor candidacy, including timely blood collection. To improve elements of the blood collection process and the quality of donor samples, an alternative donor source was considered. Parous women, including multiparous women, may have been naturally immunized to paternal miHA during pregnancy and at the time of delivery. In some cases, miHA-reactive T cells are expanded as a result of pregnancy. See Lee et al. (2019) Biol Blood Marrow Transpl. 25(4):625-638. In some embodiments, the T cells have been obtained from naïve male PBMCs.

[0167] In some aspects, whole exome sequencing is used to type parous volunteers for their HLA repertoire and for polymorphisms that encode the HA-1 miHA or the nonimmunogenic variant. For those subjects with an appropriate HLA type, which lacked HA-1, the child/children or father of the progeny are then typed to determine whether they expressed the desired HA-1. If so, it is possible that the mother is immunized during pregnancy/childbirth. Such suitable parous women are recruited for blood collection. Anti-HA-1 reactive T cells from a parous woman are identified on the basis of their binding an HLA-multimer folded with the HA-1 peptide. These cells are single cell sorted and their TCRs are screened for anti-HA-1 reactivity.

### B. High-Throughput Isolation, Amplification and Assembly of Nucleic Acid Sequences Encoding TCRs

[0168] In some aspects, nucleic acid molecules encoding a TCR can be obtained or identified from a variety of sources. In some aspects, TCRs can be obtained or identified using a high-throughput TCR isolation and screening method. Examples of such methods that can be used include those described in, for example, WO2018/102473, which is incorporated by reference in its entirety. In some aspects, the high-throughput TCR isolation and screening methods involve the amplification of nucleic acids encoding TCR alpha and/or beta chains, or TCR gamma and/or delta chains, from a plurality of different cells, such as T cells, isolated from a donor. Also provided herein are such methods related to isolating or screening a plurality of different TCRs to obtain TCRs that are specific for a hematopoietically restricted minor histocompatibility antigen, such as a HA-1 peptide.

[0169] In some embodiments, nucleic acid molecules encoding a TCR can be obtained from a variety of sources, such as by polymerase chain reaction (PCR) amplification of encoding nucleic acids within or isolated from a given cell or cells. In some embodiments, a TCR is obtained from a biological source, such as from cells such as from T cells (e.g. cytotoxic T cells), T cell hybridomas, or other publicly available sources. In some embodiments, a TCR may be derived from one of various animal species, such as a human, mouse, rat, or other mammal. In some embodiments, the T cells can be obtained from in vivo isolated cells, such as from normal (or healthy) subjects or diseased subjects, including T cells present in peripheral blood mononuclear cells (PBMCs) or tumor-infiltrating lymphocytes (TILs). In some embodiments, the T cells can be a cultured T cell hybridoma or clone. For example, in some embodiments, to generate a vector encoding a TCR, the α and β chains can be PCR amplified from total cDNA isolated from a T cell clone expressing the TCR of interest and cloned into an expression vector. In some embodiments, the α and β chains can be synthetically generated. In some embodiments, the α and β chains are cloned into the same vector.

[0170] As described herein, the methods and materials provided herein can allow users to capture successfully most, if not all, functional TCRs from a sorted T cell population. For example, an amplification (e.g., nested amplification procedure such as a nested PCR) procedure can include using primer collections designed to amplify every known functional V segment of the two variable chains of a particular TCR (e.g., any of the known functional V segments of the α variable and β variable chains of a particular αβ TCR or any of the known functional V segments of the γ variable and 8 variable chains of a particular γδ TCR) of a mammal (e.g., a human). For humans, an amplification procedure can include a primer collection designed to amplify all 45 V segments of the α chain currently known to be functional and all 48 V segments of the β chain currently known to be functional. When referring to TCR V segments of the α chain herein, the shorthand abbreviation TRAV can be used. Likewise, when referring to TCR V segments of the β chain herein, the shorthand abbreviation TRBV can be used. The same is true for TCR V segments of the γ and δ chains, which can be referred to as TRGV and TRDV, respectively.

[0171] In some aspects, this document provides methods and materials involved in cloning functional TCRs from single T cells. For example, in some aspects, this document provides methods and materials for obtaining nucleic acid encoding a TCR from a single T cell and arranging that nucleic acid to form nucleic acid vectors successfully designed to express a TCR (e.g., a fully intact TCR such as a fully intact TCR having the variable chain combination as present in that single T cell), kits for obtaining nucleic acid encoding a TCR from a single T cell and arranging that nucleic acid to form nucleic acid vectors successfully designed to express a TCR (e.g., a fully intact TCR such as a fully intact TCR having the variable chain combination as present in that single T cell), and methods for making such kits. A cloned αβ TCR having the variable chain combination as present in a single T cell used to clone that TCR can include the VJ α segment combination as present in that single T cell, the VDJ β segment combination as present in that single T cell, the nucleotide sequence of the entire α variable region as present in that single T cell, and the nucleotide sequence of the entire β variable region as present in that single T cell. Likewise, a cloned γδ TCR having the variable chain combination as present in a single T cell used to clone that TCR can include the VJ γ segment combination as present in that single T cell, the VDJ δ segment combination as present in that single T cell, the nucleotide sequence of the entire γ variable region as present in that single T cell, and the nucleotide sequence of the entire δ variable region as present in that single T cell.

[0172] In some aspects, this document provides collections of nucleic acid primers are designed to amplify the entire coding sequence of both variable regions (e.g., the α variable region and β variable region, or the γ variable region and 8 variable region) for each expressed V segment (e.g., each expressed α V segment and β V segment, or each expressed γ V segment and δ V segment) for functional αβ or γδ TCRs of a particular mammalian species (e.g., a mouse or a human), methods for using such collections of nucleic acid primers to clone functional TCRs from single T cells, and kits containing such collections of nucleic acid primers to clone functional TCRs from single T cells.

[0173] In some aspects, the methods and materials provided herein can allow one to perform highly multiplexed reactions to clone many different TCRs (e.g., hundreds to thousands or more different TCRs) directly from single T cells quickly (e.g., simultaneously in some cases) and in a manner that misses few, if any, α/β variable chain combinations (or γ/δ variable chain combinations). For example, the methods and materials provided herein can be performed to clone many different αβ TCRs (e.g., hundreds to thousands or more different αβ TCRs) directly from single αβ T cells in a manner that misses less than 10 percent (e.g., less than 9 percent, less than 8 percent, less than 7 percent, less than 6 percent, less than 5 percent, less than 4 percent, less than 3 percent, less than 2 percent, or less than 1 percent) of the α variable chains and less than 10 percent (e.g., less than 9 percent, less than 8 percent, less than 7 percent, less than 6 percent, less than 5 percent, less than 4 percent, less than 3 percent, less than 2 percent, or less than 1 percent) of the β variable chains possible for α/β variable chain combinations of a species (e.g., mice or human species). Likewise, the methods and materials provided herein can be performed to clone many different γδ TCRs (e.g., hundreds to thousands or more different γδ TCRs) directly from single γδ T cells in a manner that misses less than 10 percent (e.g., less than 9 percent, less than 8 percent, less than 7 percent, less than 6 percent, less than 5 percent, less than 4 percent, less than 3 percent, less than 2 percent, or less than 1 percent) of the γ variable chains and less than 10 percent (e.g., less than 9 percent, less than 8 percent, less than 7 percent, less than 6 percent, less than 5 percent, less than 4 percent, less than 3 percent, less than 2 percent, or less than 1 percent) of the δ variable chains possible for γ/δ variable chain combinations of a species (e.g., mice or human species). In some cases, the methods and materials provided herein can include (a) obtaining a sample of T cells, (b) sorting those T cells into isolated locations (e.g., wells) such that most, if not all, isolated locations (e.g., each well) contain a single T cell, (c) lysing (e.g., simultaneously lysing) the single T cells located in separate isolated locations (e.g., separate wells) to release the RNA of each single T cell, (d) performing (e.g., simultaneously performing) reverse transcription using the released RNA as template, appropriate primers for cDNA synthesis from RNA, and a reverse transcriptase enzyme to produce cDNA within each isolated location (e.g., each well); that cDNA representing the RNA expressed by the single T cell that was located in that isolated location (e.g., well), (e) performing (e.g., simultaneously performing), for each isolated location, a first round amplification reaction (e.g., a first round polymerase chain reaction (PCR)) of an amplification procedure (e.g., such as a nested amplification procedure such as a nested PCR) using the produced cDNA as template, a first round primer collection (e.g., a first round PCR primer collection), and a polymerase (e.g., Taq polymerase) to produce at least an amplification product containing a nucleic acid sequence of the α variable chain (or γ variable chain) of the TCR of the single T cell of that isolated location and an amplification product containing a nucleic acid sequence of the β variable chain (or δ variable chain) of the TCR of that same single T cell of that same isolated location, (f) performing (e.g., simultaneously performing), for each isolated location, a second round amplification reaction (e.g., a second round PCR) of a nested amplification procedure (e.g., a nested PCR procedure) using the amplification products of the first round amplification reaction as template, a second round primer collection (e.g., a second round PCR primer collection), and a polymerase (e.g., Taq polymerase) to produce at least a first amplification product containing a nucleic acid sequence of the α variable chain (or γ variable chain) of the TCR of the single T cell of that isolated location and a second amplification product containing a nucleic acid sequence of the β variable chain (or δ variable chain) of the TCR of that same single T cell of that same isolated location, and (g) cloning, for each isolated location, the first and second amplification products into an expression vector designed to express a functional TCR having the α/β or γ/δ variable chain combination (or a portion thereof such as the V segments of the α/β or γ/δ variable chain combination) as was present in the single T cell used to generate the amplification products.

[0174] The resulting expression vectors can be introduced into cells such that those cells express the cloned TCRs. Such cells and/or the TCRs they express from the introduced expression vectors can be screened to identify TCRs with desired capabilities. For example, cells expressing cloned TCRs that recognize particular antigens (e.g., peptides derived from tumor polypeptides) can be identified, and those cells, the TCR expression vectors they contain, or the cloned TCR constructs can be used for further analysis or for therapeutic applications.

[0175] In some cases, expression of cloned TCRs on the surface and expression of functional TCRs can be assessed by introducing the expression vectors into TCR-negative reporter cells designed to express a measurable marker signal or marker polypeptide once the signaling apparatus of a functional TCR is engaged. In these cases, an antibody designed to non-specifically activate TCRs (e.g., an anti-CD3 antibody) can be used to screen for functional TCRs. In some cases, the cloned TCRs can be screened for antigen specificity. For example, reporter cells expressing cloned TCRs can be screened for the recognition of particular antigens (e.g., peptides derived from tumor polypeptides). In some cases, primary T cells (e.g., human primary T cells) can be transfected with expression vectors and screened for antigen specificity via T cell proliferation assays.

[0176] The methods and materials provided herein can allow clinicians, medical professionals, laboratory personnel, and researchers to use a collection of T cells having different TCRs to generate collections of expression vectors that express functional versions of those different TCRs that have the same variable chain combinations or portions thereof (e.g., the same α/β variable chain combination or the same γ/δ variable chain combination) as present in original T cells used to generate the collection. Such collections of expression vectors can be obtained quickly, efficiently, inexpensively, and effectively. For example, in some cases, using the methods and materials provided herein, a collection of expression vectors that express functional versions of many different TCRs with authentic variable chain combinations as found in T cells obtained from a mammal (e.g., a human) can be generated within less than 12 days (e.g., from 4 to 11 days, from 5 to 11 days, from 6 to 11 days, from 7 to 11 days, from 8 to 11 days, from 4 to 10 days, from 5 to 10 days, from 6 to 10 days, from 7 to 10 days, from 8 to 10 days, from 4 to 9 days, from 5 to 9 days, from 6 to 9 days, from 7 to 9 days, from 4 to 8 days, from 5 to 8 days, from 6 to 8 days, or from 7 to 8 days), using less than 12 steps (e.g., from 5 to 11 steps, from 6 to 11 steps, from 7 to 11 steps, from 8 to 11 steps, from 5 to 10 steps, from 6 to 10 steps, from 7 to 10 steps, from 8 to 10 steps, from 5 to 9 steps, from 6 to 9 steps, from 7 to 9 steps, or from 8 to 9 steps), for less than about 10 dollars per TCR, and with greater than about 80 percent (e.g., greater than about 85, 90, or 95 percent) effectiveness (based on sorting a single T cell into each of 384 wells of 384-well plate). In some cases, the methods and materials provided herein can be performed without performing nucleic acid sequencing, without performing restriction endonuclease cleavage steps, without performing other steps or techniques as described herein, and/or without using particular reagents or materials as described herein.

[0177] The methods and materials provided herein also can allow users to capture successfully most, if not all, functional TCRs from a sorted T cell population. For example, in some cases, the methods and materials provided herein can include a nested amplification procedure (e.g., a nested PCR procedure) that includes primer collections designed to amplify every known functional V segment of the two variable chains of a particular TCR (e.g., any of the known functional V segments of the α variable and B variable chains of a particular αβ TCR or any of the known functional V segments of the γ variable and δ variable chains of a particular γδ TCR) of a mammal (e.g., a human). Having the ability to clone most, if not all, functional TCRs from a sorted T cell population can allow users to identify particular TCRs, including rare TCRs, that might otherwise be missed. It is these rare TCRs that might be missed that could provide a rich source of new cloned TCRs for effective therapies such as cancer therapies involving the delivery of effective T cells.

[0178] In some cases, the methods and materials provided herein can allow users to obtain additional information about the single T cells from which functional TCR clones are generated. In some cases, the flow cytometry techniques used for single cell sorting described herein can be used to distinguish activated and experienced cells from naïve T cells by staining those cells for activation markers. When applying the methods and materials provided herein in methods for treating a particular disease (e.g., cancer), T cells can be isolated from a patient that have already been activated and expanded within that patient. Once these T cells are isolated, and cDNA is generated from single cell RNA, an additional level of selection can be applied. For example, in addition to using cDNA produced from the RNA of a single T cell to amplify and clone the variable chains (or portions thereof) of that T cell's TCR, that cDNA also can be used to assess RNA expression and/or RNA expression levels within that T cell.

[0179] In the case of CD8″ T cells, TCRs associated with polyfunctional (e.g., multi-cytokine producers) effector cells or TCRs associated with quiescent or exhausted long-lived memory cells can be identified by examining the relative mRNA levels for expression of transcription factors such as Eomesodermin and T-bet (McLane et al., J. Immunol., 190(7):3207-3215 (2013); and Buggert et al., PLOS Pathog., 10(7):e1004251 (2014)).

[0180] In some cases, T cells can be stimulated (e.g., in vitro stimulated) prior to sorting, and then RNA expression can be assessed (via, e.g., qPCR) to determine which T cells responded to the stimulation. Any appropriate type of stimulation can be used including, without limitation, non-specific stimulation such as stimulation with concanavalin A, phytohemagglutinin-P, phorbol esters plus ionomycin, phorbol myristate acetate plus calcium ionophores, or antibodies having the ability to cross link TCRs (e.g., anti-CD3 antibodies plus anti-CD28 antibodies, or anti-TCR β antibodies) or antigen-specific stimulation such as stimulation with one or more particular antigens as described elsewhere (Downward et al., Nature, 346:719-23 (1990); and Dasgupta et al., Proc. Natl. Acad. Sci. USA, 84:1094-8 (1987)). In some cases, cytokine expression levels such as TNF-α, IFN-γ, IL-2, IL-4, IL-5, IL-10, IL-13, or IL-17 expression levels can be determined and compared to non-stimulated populations. Once single T cells are sorted, the methods provided herein can be used to determine which T cells were making particular cytokines in response to the stimulation (e.g., in response to a peptide antigen used to stimulate the T cells). In these cases, antigen specific T cells can be determined without laborious methods of expanding reactive T cells or the destructive methods of paraformaldehyde fixation and intracellular cytokine staining, which can reduce the ability to clone TCRs effectively. In such cases, particular TCRs generated from active and antigen specific T cells, as opposed to inactive bystander T cells, can be quickly identified.

[0181] In some cases, cytokine expression levels such as TNF-α, IFN-γ, IL-2, IL-4, IL-5, IL-10, IL-13, or IL-17 expression levels can be determined for the single T cells used to clone functional TCRs, thereby allowing a particular TCR to be identified based on the particular phenotype (e.g., elevated IFN-γ expression) of the T cell that provided the variable chains (or portions thereof) of that particular TCR. In such cases, particular TCRs generated from active, as opposed to inactive, T cells can be quickly identified. In some cases, particular TCRs generated from inactive, as opposed to active, T cells can be quickly identified.

[0182] In some cases, the absence of cytokine production by a T cell does not necessarily reflect an absence of TCR specificity. TCR initiated signals to a cell can be subverted and/or repressed by numerous inhibitory co-receptors (Sheppard et al., FEBS Lett., 574(1-3):37-41 (2004); and Yokosuka et al., J. Exp. Med., 209(6): 1201-1217 (2012)). In some cases, TCRs can be obtained using T cells refractory to stimulation, and the specificity of the cloned TCR can be tested or screened in cells where canonical TCR signaling is not repressed.

[0183] In some cases, a MHC-peptide complex (or an HLA-peptide complex) can be used to identify cloned TCRs that recognize such a complex. In these cases, it is possible that clonal exclusion during an immune response and/or a lack of antigen priming may result in TCRs with this specificity not being present in the activated and/or expanded TCR pool. In such cases, the methods and materials provided herein, which in some cases only requires a single T cell to be present, can be used to clone a naïve or inactivated TCR that recognizes such a complex. In some cases, pools of naïve T cells can be stained with MHC-peptide tetramers (or HLA-peptide tetramers), and any MHC-peptide (or HLA-peptide) responsive TCRs among the naïve T cells can be used to clone those TCRs using the methods and materials provided herein.

[0184] In some aspects, the methods provided herein include methods for obtaining a plurality of nucleic acid vectors containing nucleic acid encoding functional T cell receptors. The method comprises, or consists essentially of, (a) obtaining a device comprising a plurality of separate locations, wherein each of the separate locations contains cDNA generated from RNA obtained from a single T cell that was sorted into the separate locations, (b) performing a nested amplification procedure using the cDNA of each of the plurality of separate locations as template to obtain a first amplification product and a second amplification product for the cDNA of each of the plurality of separate locations, wherein the first amplification product comprises nucleic acid encoding α Vα or Vγ segment, and wherein the second amplification product comprises nucleic acid encoding α Vβ or Vδ segment, and (c) assembling the first amplification product and the second amplification product for the cDNA of each of the plurality of separate locations into a nucleic acid vector to obtain an assembled nucleic acid vector for the cDNA of each of the plurality of separate locations, wherein the assembled nucleic acid vectors for the cDNA of each of the plurality of separate locations comprises nucleic acid encoding a functional T cell receptor. The plurality can be greater than 50. The plurality can be greater than 500. The plurality can be greater than 5000. The plurality of nucleic acid vectors can be a plurality of nucleic acid expression vectors. The device can comprise a multi-well plate. The multi-well plate can be a 96-well plate, a 384-well plate, or a 1536-well plate. The cDNA generated from RNA obtained from a single T cell single can comprise cDNA generated from RNA obtained from a single human T cell. The first amplification product can comprise nucleic acid encoding an L sequence of α Vα or Vγ segment. The first amplification product can comprise nucleic acid encoding a Jα or Jγ segment. The first amplification product can comprise nucleic acid encoding a 5′ portion of a Cα or Cγ region. The first amplification product can comprise nucleic acid encoding an L sequence of α Vα or Vγ segment, a Jα or Jγ segment, and a 5′ portion of a Cα or Cγ region. The second amplification product can comprise nucleic acid encoding an L sequence of α Vβ or Vδ segment. The second amplification product can comprise nucleic acid encoding a DB or Dδ segment. The second amplification product can comprise nucleic acid encoding a Jβ or Jδ segment. The second amplification product can comprise nucleic acid encoding a 5′ portion of a Cβ or Cδ region. The second amplification product can comprise nucleic acid encoding an L sequence of α Vβ or Vδ segment, a Dβ or Dδ segment, a Jβ or Jδ segment, and a 5′ portion of a Cβ or Cδ region. The first amplification product can comprise an adapter sequence added to an amplified template sequence of the cDNA via a second round amplification of the nested amplification procedure. The second amplification product can comprise an adapter sequence added to an amplified template sequence of the cDNA via a second round amplification of the nested amplification procedure. The first amplification product can comprise a first adapter sequence added to an amplified template sequence of the cDNA via a second round amplification of the nested amplification procedure, and the second amplification product can comprise a second adapter sequence added to an amplified template sequence of the cDNA via a second round amplification of the nested amplification procedure, wherein the first and second adapter sequence are different. The functional T cell receptor of each of the assembled nucleic acid vectors can comprise a Vα/Vβ combination or Vγ/Vδ combination as present in the single T cell originating the RNA. The functional T cell receptor of each of the assembled nucleic acid vectors can comprise (a) a full-length a variable region and a full-length β variable region or (b) a full-length γ variable region and a full-length δ variable region. The functional T cell receptor of each of the assembled nucleic acid vectors can comprise (a) a full-length a variable region and a full-length β variable region as present in the single T cell originating the RNA or (b) a full-length γ variable region and a full-length δ variable region as present in the single T cell originating the RNA. The functional T cell receptor of each of the assembled nucleic acid vectors can comprise (a) a full-length a constant region and a full-length β constant region or (b) a full-length γ constant region and a full-length β constant region. Each of the assembled nucleic acid vectors can comprise a nucleic acid sequence encoding a self-cleaving peptide or an internal ribosome entry site (IRES). The method can comprise sorting single T cells into the separate locations. The method can comprise performing a reverse transcription reaction to obtain the cDNA. The assembling step can comprise seamless cloning. Each of the assembled nucleic acid vectors can be obtained without performing nucleic acid sequencing. Each of the assembled nucleic acid vectors can be obtained without performing a restriction endonuclease cleavage reaction.

### C. Assessing Minor Histocompatibility Antigen Specific T Cell Receptor Expression, Activity and Function

[0185] Exemplary assays can be used to assess the activity, expression and/or function of the TCRs and antigen-binding fragments described herein. The assays described herein, which are not to be construed as limiting, may be used to assess the functional capacity of candidate miHA-specific TCRs.

[0186] Functional characterization of TCRs is performed either by binding assays utilizing fluorescent labeled MHC molecules carrying specific target peptides (tetramer/pentamer/dextramer), or activation assays by co-culturing TCR expressing cells with antigen presenting cells (APCs) presenting the corresponding MHC/peptide complexes.

[0187] A cytokine release assay can evaluate the ability of a candidate TCR to produce the cytokines IL-2 and/or IFN-γ following exposure to cells presenting the target antigen. T cells are incubated with T2 cells (HA-1(neg)/HLA-A *: 02:01^{(pos)}) loaded with the target HA-1 “H” peptide. As a control, T2 cells are loaded with the non-target HA-1 “R” peptide or an irrelevant peptide control. IL-2 and/or IFN-γ responses of the T cells are followed by intracellular cytokine staining and analysis by FACS.

[0188] A T cell activation/degranulation marker assay can evaluate the ability of candidate TCRs to express the surface marker CD107a following exposure to cells presenting the target antigen. CD107a is a marker of T cell degranulation, which is part of the cell killing response. T cells are incubated with T2 cells loaded with the target HA-1 “H” peptide. As a control, T2 cells are loaded with the non-target HA-1 “R” peptide or an irrelevant peptide control. Degranulation responses are followed on the T cells by CD107a surface staining and analysis by FACS.

[0189] A killing assay can evaluate the ability of candidate TCRs to lyse cells presenting the target antigen. T cells are incubated with a mixture of fluorescent-tag labeled T2 cells differentially loaded with target and control peptides to allow on-target and off-target cytotoxicity to be examined within a single test sample. Fluorescent cell counting beads are included as a normalization/count control. Fluorescently tagged T2 cells are loaded with the target HA-1 “H” peptide. As a control, T2 cells labeled with a different fluorescent-tag are loaded with the non-target HA-1 “R” peptide or an irrelevant peptide control. Gated cell counts of HA-1 “H” peptide loaded T2 cells a control peptide loaded T2 cells remaining after incubation with T cells are followed by FACS.

[0190] The CD34 marker may be used as a surrogate potency measurement. See Philip et al. (2014) Blood 124(8): 1277-1287. Detection of CD34, a marker of transduction efficiency, may correlate with the functional potency measurements described herein.

[0191] In some aspects, expanded and unexpanded screens are performed using the exact same donor for a direct comparison of methods. With certain methods, expansion may be performed. A method that yields candidate TCRs without expansion processes can be advantageous in some contexts in view of the time sensitivity of screening for TCRs with desired specificity. Reduced sample processing may also offer advantages in different contexts.

### IV. Engineered Cells

[0192] Also provided herein are cells such as cells that have been engineered to contain a TCR described herein. Also provided herein are populations of such cells and compositions containing such cells and/or enriched for such cells, such as in which cells expressing the TCR make up at least 15%, 20%, 25%, 30%, 35%, 40%, 50%, 60%, 70%, 80%, 90%, 91%, 92%, 93%, 94%, 95%, 96%, 97%, 98%, 99%, or more percent of the total cells in the composition. In some embodiments, the cells are primary T cells or cells of a certain type such as T cells or CD8+ or CD4+ cells. Among the compositions are pharmaceutical compositions and formulations for administration, such as for adoptive cell therapy. Also provided herein are therapeutic methods for administering the cells and compositions to subjects, e.g., patients.

[0193] Thus also provided herein are genetically engineered cells expressing a TCR provided herein. The cells generally are eukaryotic cells, such as mammalian cells, and typically are human cells. In some embodiments, the cells are derived from the blood, bone marrow, lymph, or lymphoid organs, and are cells of the immune system, such as cells of the innate or adaptive immune system, e.g., myeloid or lymphoid cells, including lymphocytes, typically T cells and/or NK cells. Other exemplary cells include stem cells, such as multipotent and pluripotent stem cells, including induced pluripotent stem cells (iPSCs). The cells typically are primary cells, such as those isolated directly from a subject and/or isolated from a subject and frozen. In some embodiments, the cells include one or more subsets of T cells or other cell types, such as whole T cell populations, CD4+ cells, CD8+ cells, and subpopulations thereof, such as those defined by function, activation state, maturity, potential for differentiation, expansion, recirculation, localization, and/or persistence capacities, antigen-specificity, type of antigen receptor, presence in a particular organ or compartment, marker or cytokine secretion profile, and/or degree of differentiation. With reference to the subject to be treated, the cells may be allogeneic and/or autologous. Among the methods provided herein include off-the-shelf methods. In some aspects, such as for off-the-shelf technologies, the cells are pluripotent and/or multipotent, such as stem cells (e.g., iPSCs). In some embodiments, the methods provided herein include isolating cells from the subject, preparing, processing, culturing, and/or engineering them, as described herein, and re-introducing them into the same patient, before or after cryopreservation.

[0194] Among the sub-types and subpopulations of T cells and/or of CD4+ and/or of CD8+ T cells included herein are naïve T (T_{N}) cells, effector T cells (T_{EFF}), memory T cells and sub-types thereof, such as stem cell memory T (T_{SCM}), central memory T (T_{CM}), effector memory T (TEM), or terminally differentiated effector memory T cells, tumor-infiltrating lymphocytes (TIL), immature T cells, mature T cells, helper T cells, cytotoxic T cells, mucosa-associated invariant T (MAIT) cells, naturally occurring and adaptive regulatory T (Treg) cells, helper T cells, such as TH1 cells, TH2 cells, TH3 cells, TH17 cells, TH9 cells, TH22 cells, follicular helper T cells, alpha/beta T cells, and delta/gamma T cells.

[0195] In some embodiments, the cells are NK cells. In some embodiments, the cells are monocytes or granulocytes, e.g., myeloid cells, macrophages, neutrophils, dendritic cells, mast cells, eosinophils, and/or basophils.

[0196] In some embodiments, the cells include one or more nucleic acids introduced via genetic engineering, and thereby express recombinant or genetically engineered products of such nucleic acids. In some embodiments, the nucleic acids are heterologous, i.e., normally not present in a cell or sample obtained from the cell, such as one obtained from another organism or cell, which for example, is not ordinarily found in the cell being engineered and/or an organism from which such cell is derived. In some embodiments, the nucleic acids are not naturally occurring, such as a nucleic acid not found in nature, including one comprising chimeric combinations of nucleic acids encoding various domains from multiple different cell types.

[0197] In some embodiments, the expression of the endogenous TCR chains of the engineered cell is reduced or eliminated, for example, to reduce the risk or chance of mispairing between chains of the engineered TCR and the endogenous TCR. Such mispairing could create a new TCR that could potentially result in a higher risk of undesired or unintended antigen recognition and/or side effects and/or could reduce expression levels of the desired exogenous TCR. Exemplary methods for reducing or preventing endogenous TCR expression are described elsewhere, see e.g. U.S. Pat. No. 9,273,283; U.S. publication no. US2014/0301990.

### A. Preparation of Cells for Genetic Engineering

[0198] In some embodiments, preparation of the engineered cells includes one or more culture and/or preparation steps. The cells for introduction of the TCR may be isolated from a sample, such as a biological sample, e.g., one obtained from or derived from a subject. In some embodiments, the subject from which the cell is isolated is one having the disease or condition or in need of a cell therapy or to which cell therapy will be administered. The subject in some embodiments is a human in need of a particular therapeutic intervention, such as the adoptive cell therapy for which cells are being isolated, processed, and/or engineered.

[0199] Accordingly, the cells in some embodiments are primary cells, e.g., primary human cells. The samples include tissue, fluid, and other samples taken directly from the subject, as well as samples resulting from one or more processing steps, such as separation, centrifugation, genetic engineering (e.g. transduction with viral vector), washing, and/or incubation. The biological sample can be a sample obtained directly from a biological source or a sample that is processed. Biological samples include, but are not limited to, body fluids, such as blood, plasma, serum, cerebrospinal fluid, synovial fluid, urine and sweat, tissue and organ samples, including processed samples derived therefrom.

[0200] In some aspects, the sample from which the cells are derived or isolated is blood or a blood-derived sample, or is or is derived from an apheresis or leukapheresis product. Exemplary samples include whole blood, PBMCs, leukocytes, bone marrow, thymus, tissue biopsy, tumor, leukemia, lymphoma, lymph node, gut associated lymphoid tissue, mucosa associated lymphoid tissue, spleen, other lymphoid tissues, liver, lung, stomach, intestine, colon, kidney, pancreas, breast, bone, prostate, cervix, testes, ovaries, tonsil, or other organ, and/or cells derived therefrom. Samples include, in the context of cell therapy, e.g., adoptive cell therapy, samples from autologous and allogeneic sources.

[0201] In some embodiments, the cells are derived from cell lines, e.g., T cell lines. The cells in some embodiments are obtained from a xenogeneic source, for example, from mouse, rat, non-human primate, or pig.

### B. Vectors and Methods for Genetic Engineering

[0202] Also provided herein are methods, nucleic acids, compositions, and kits for expressing a TCR or antigen-binding fragment thereof provided herein, and for producing the genetically engineered cells expressing such TCR or antigen-binding fragment thereof. The genetic engineering generally involves introduction of a nucleic acid encoding the TCR (or antigen-binding fragment thereof) into the cell, such as by retroviral transduction, transfection, or transformation.

[0203] In some embodiments, gene transfer is accomplished by first stimulating the cell, such as by combining it with a stimulus that induces a response such as proliferation, survival, and/or activation, e.g., as measured by expression of a cytokine or activation marker, followed by transduction of the activated cells, and expansion in culture to numbers sufficient for clinical applications.

[0204] Various methods for the introduction of genetically engineered components are well known and may be used with the provided methods and compositions. Exemplary methods include those for transfer of nucleic acids encoding a TCR or antigen-binding fragment thereof provided herein, including via viral, e.g., retroviral or lentiviral, transduction, transposons, and electroporation.

[0205] In some embodiments, recombinant nucleic acids are transferred into cells using recombinant infectious virus particles. In some embodiments, recombinant nucleic acids are transferred into T cells using recombinant lentiviral vectors or retroviral vectors, such as gamma-retroviral vectors (see, e.g., Koste et al. (2014) Gene Therapy 2014 Apr 3. doi: 10.1038/gt.2014.25; Carlens et al. (2000) Exp Hematol 28(10): 1137-46; Alonso-Camino et al. (2013) Mol Ther Nucl Acids 2, e93; Park et al., Trends Biotechnol. 2011 November 29(11): 550-557).

[0206] In some embodiments, the retroviral vector has a long terminal repeat sequence (LTR), e.g., a retroviral vector derived from the Moloney murine leukemia virus (MoMLV), myeloproliferative sarcoma virus (MPSV), murine embryonic stem cell virus (MESV), murine stem cell virus (MSCV), or spleen focus forming virus (SFFV). Most retroviral vectors are derived from murine retroviruses. In some embodiments, the retroviruses include those derived from any avian or mammalian cell source. The retroviruses typically are amphotropic, meaning that they are capable of infecting host cells of several species, including humans. In one embodiment, the nucleic acid to be expressed replaces the retroviral gag, pol and/or env sequences. A number of illustrative retroviral systems have been described elsewhere (see, e.g., U.S. Pat. Nos. 5,219,740; 6,207,453; 5,219,740; Miller and Rosman (1989) BioTechniques 7:980-990; Miller, A. D. (1990) Human Gene Therapy 1:5-14; Scarpa et al. (1991) Virology 180:849-852; Burns et al. (1993) Proc. Natl. Acad. Sci. USA 90:8033-8037; and Boris-Lawrie and Temin (1993) Cur. Opin. Genet. Develop. 3:102-109).

[0207] Methods of lentiviral transduction are known. Exemplary methods are described in, e.g., Wang et al. (2012) J. Immunother. 35(9): 689-701; Cooper et al. (2003) Blood. 101:1637-1644; Verhoeyen et al. (2009) Methods Mol Biol. 506: 97-114; and Cavalieri et al. (2003) Blood. 102(2): 497-505.

[0208] In some embodiments, recombinant nucleic acids are transferred into T cells via electroporation (see, e.g., Chicaybam et al, (2013) PLOS ONE 8(3): e60298 and Van Tedeloo et al. (2000) Gene Therapy 7(16): 1431-1437). In some embodiments, recombinant nucleic acids are transferred into T cells via transposition (see, e.g., Manuri et al. (2010) Hum Gene Ther 21(4): 427-437; Sharma et al. (2013) Molec Ther Nucl Acids 2, e74; and Huang et al. (2009) Methods Mol Biol 506: 115-126). Other methods of introducing and expressing nucleic acid provided herein in immune cells include calcium phosphate transfection (e.g., as described in Current Protocols in Molecular Biology, John Wiley δ Sons, New York. N.Y.), protoplast fusion, cationic liposome-mediated transfection, tungsten particle-facilitated microparticle bombardment (Johnston, Nature, 346: 776-777 (1990)), and strontium phosphate DNA co-precipitation (Brash et al., Mol. Cell Biol., 7: 2031-2034 (1987)).

[0209] Other approaches and vectors for transfer of nucleic acid encoding a TCR, antigen-binding fragment thereof, or recombinant product provided herein include those described elsewhere. See, e.g., International Patent Application Publication No. WO2014/055668 and U.S. Pat. No. 7,446,190.

[0210] In some cases, one or more additional nucleic acids can be introduced into a cell concurrently with or sequentially with nucleic acid encoding a TCR or antigen-binding fragment thereof provided herein. In some cases, such an additional nucleic acid for introduction can be those that improve the efficacy of therapy, such as by promoting viability and/or function of transferred cells; those that provide a genetic marker for selection and/or evaluation of the cells, such as to assess in vivo survival or localization; and/or those that improve safety, for example, by making the cell susceptible to negative selection in vivo as described elsewhere (Lupton S. D. et al., Mol. and Cell Biol., 11:6 (1991); and Riddell et al., Human Gene Therapy 3:319-338 (1992)). See, also, (a) the publications of PCT/US91/08442 and PCT/US94/05601 by Lupton et al. describing the use of bifunctional selectable fusion genes derived from fusing a dominant positive selectable marker with a negative selectable marker, and (b) Riddell et al., U.S. Pat. No. 6,040,177, at columns 14-17.

[0211] Thus, provided in some embodiments are engineered cells, such as those containing a TCR or antigen-binding fragment thereof, nucleic acid, or vector as described herein. In some aspects, the cell is produced by transducing the cell in vitro or ex vivo with a vector described herein. In some aspects, the cell is a T cell, such as a CD8+ or CD4+ T cell. In some embodiments, the TCR is heterologous to the cell.

### V. Therapeutic and Prophylactic Methods and Uses

[0212] Also provided herein are methods of administering and uses, such as therapeutic and prophylactic uses, of the TCRs and antigen-binding fragments thereof provided herein and/or engineered cells expressing the TCRs or antigen-binding fragments thereof. Such methods and uses include therapeutic methods and uses, for example, involving administration of the molecules, cells, or compositions containing the same, to a subject having a hematological disease, condition, or disorder to which alloSCT is a treatment option. In some embodiments, the molecule, cell, and/or composition is administered in an effective amount to effect treatment of the disease or disorder. Uses include uses of the TCRs and cells in such methods and treatments, and in the preparation of a medicament in order to carry out such therapeutic methods. In some embodiments, the methods are carried out by administering the TCRs or cells, or compositions comprising the same, to the subject having, having had, or suspected of having the disease or condition. In some embodiments, the methods thereby treat the disease or condition or disorder in the subject.

[0213] As used herein, “treatment” (and grammatical variations thereof such as “treat” or “treating”) refers to complete or partial amelioration or reduction of a disease or condition or disorder, or a symptom, adverse effect or outcome, or phenotype associated therewith. Desirable effects of treatment include, but are not limited to, preventing occurrence or recurrence of disease, alleviation of symptoms, diminishment of any direct or indirect pathological consequences of the disease, preventing metastasis, decreasing the rate of disease progression, amelioration or palliation of the disease state, and remission or improved prognosis. The terms do not imply complete curing of a disease or complete elimination of any symptom or effect(s) on all symptoms or outcomes.

[0214] As used herein, “delaying development of a disease” means to defer, hinder, slow, retard, stabilize, suppress and/or postpone development of the disease (such as cancer). This delay can be of varying lengths of time, depending on the history of the disease and/or individual being treated. As is evident to one skilled in the art, a sufficient or significant delay can, in effect, encompass prevention, in that the individual does not develop the disease. For example, a late stage cancer, such as development of metastasis, may be delayed.

[0215] “Preventing,” as used herein, includes providing prophylaxis with respect to the occurrence or recurrence of a disease in a subject that may be predisposed to the disease but has not yet been diagnosed with the disease. In some embodiments, the provided molecules and compositions are used to delay development of a disease or to slow the progression of a disease.

[0216] As used herein, to “suppress” a function or activity is to reduce the function or activity when compared to otherwise same conditions except for a condition or parameter of interest, or alternatively, as compared to another condition. For example, a TCR or composition or cell which suppresses tumor growth reduces the rate of growth of the tumor compared to the rate of growth of the tumor in the absence of the TCR or composition or cell.

[0217] An “effective amount” of an agent, e.g., a pharmaceutical formulation, TCR, cells, or composition, in the context of administration, refers to an amount effective, at dosages/amounts and for periods of time necessary, to achieve a desired result, such as a therapeutic or prophylactic result.

[0218] A “therapeutically effective amount” of an agent, e.g., a pharmaceutical formulation, TCR, or cells, refers to an amount effective, at dosages and for periods of time necessary, to achieve a desired therapeutic result, such as for treatment of a disease, condition, or disorder, and/or pharmacokinetic or pharmacodynamic effect of the treatment. The therapeutically effective amount may vary according to factors such as the disease state, age, sex, and weight of the subject, and the populations of cells administered. In some embodiments, the provided methods involve administering the TCRs, cells, and/or compositions at effective amounts, e.g., therapeutically effective amounts.

[0219] A “prophylactically effective amount” refers to an amount effective, at dosages and for periods of time necessary, to achieve the desired prophylactic result. Typically but not necessarily, since a prophylactic dose is used in subjects prior to or at an earlier stage of disease, the prophylactically effective amount will be less than the therapeutically effective amount.

[0220] As used herein, a “subject” is a mammal, such as a human or other animal, and typically is human.

[0221] Among the diseases to be treated are cancers. In some embodiments, the disease or condition to be treated is a liquid tumor. In some embodiments, the disease or condication to be treated is a hematopoietic tumor. In some embodiments, the disease or condition to be treated is a lymphoma. In some embodiments, the disease or condition to be treated is acute myeloid leukemia (AML), a myelodysplastic syndrome (MDS), or acute lymphoblastic leukemia (ALL). In some embodiments, the disease or condition to be treated is chronic myeloid leukemia (CML).

### A. Exemplary Hematological Malignancies, Allogeneic Stem Cell Transplantation, and Patient Outcomes

### 1. Acute Myeloid Leukemia (AML)

[0222] Although AML is the most common indication for alloSCT, only half of the patients with early to intermediate disease and one third of patients with advanced disease survived at 3 years after transplant. See D'Souza et al. (2020) Biol Blood Marrow Transplant J Am Soc Blood Marrow Transplant 26(8): e177-e182. The most common cause of death in both early and late disease is relapse of primary disease. The recipient with overt active AML (i.e. >5% morphologically evident disease in the bone marrow) or measurable residual disease (MRD) at the time of alloSCT have a worse post-transplant prognosis than patients without MRD at the time of alloSCT. Methods for determining the presence or absence of MRD have evolved significantly and include evaluation for morphologic remission, multiparameter flow cytometry (MFC) and next-generation sequencing (NGS). MFC and NGS allow for determining presence of MRD down to 1×10⁴-1:10⁶ cells versus 1:20 in morphology-based determinations. See Schuurhuis et al. (2018) Blood 131(12): 1275-1291 and Getta et al. (2017) Biol Blood Marrow Transpl. 23(7): 1064-1071.

[0223] Longer term outcomes for patients with MRD are poor, with relapse occurring in 65% of subjects, resulting in RFS of 13% and overall survival (OS) of 19-23% at three years. See Araki et al. (2016) J Clin Oncol. 34(4):329-336 and Duval et al. (2010) J Clin Oncol. 28(23): 3730-3738. The three-year relapse rate in one retrospective study for MRD-positive patients was 67% (similar to the 65% relapse rate found in those with active AML), compared to 22% relapse in patients with MRD-negative remission. See Araki et al. (2016) J Clin Oncol. 34(4):329-336. Other published studies have yielded similar results. See Mohty et al. (2017) Haematologica. 102(1):184-191, Decroocq et al. (2018) Am J Hematol. 93(3):416-423, and Walter et al. (2013) Blood 122(10): 1813-1821. Despite very poor outcomes, one retrospective study demonstrated the benefit of alloSCT for MRD-positive patients in comparison to a no transplant option, chemotherapy. See Jurjen et al. (2017) JCO Precis Oncol. (1):1-13.

[0224] Therapies targeting specific mutations, such as IDH or FLT3 inhibitors, have been used in salvage regimens and increasingly up front. See Lai et al. (2019) J Hematol Oncol 12(1): 100. But despite these agents, which are active in only a minority of leukemias, relapsed/refractory disease will remain a major clinical problem. Likewise, post-transplant hypomethylating agents are currently used, but have an uncertain effect on long term survival. See Platzbecker et al. (2012) Leukemia 26(3):381-389, Craddock et al. (2019) J Clin Oncol Off J Am Soc Clin Oncol. 37(7):580-588, and Rautenberg et al. (2020) Bone Marrow Transplant 1-9.

[0225] AlloSCT remains the standard of care for AML with active disease or with MRD, despite a disappointing 60% of recipients relapsing during the first year, and less than one-third of patients becoming long-term survivors. See D'Souza et al. (2020) Biol Blood Marrow Transplant J Am Soc Blood Marrow Transplant 26(8):e177-e182. Most patients with overt disease are typically not offered alloSCT due to this likelihood of relapse during the first year. There is an urgent unmet medical need to extend the length of time before relapse (e.g., to extend the time to relapse beyond 1, 2, 3, 4, or 5 years) in MRD-positive patients who undergo alloSCT. There also is an urgent unmet medical need to prevent relapse in MRD-positive patients who undergo alloSCT.

### 2. Myelodysplastic Syndrome

[0226] The risk of having an MDS relapse after alloSCT is greater in patients transplanted with higher risk disease as measured by the Revised International Prognostic Scoring System (IPSS-R). Approximately 50-60% of very-poor risk MDS patients relapsed in 2 years after alloSCT. Monosomy cytogenetic abnormalities are also associated with a higher risk of relapse independent of IPSS score. See Koenecke et al. (2015) Haematologica. 100(3):400-408 and Deeg et al. (2012) Blood 120(7):1398-1408. More recently, specific somatic mutation profiles were shown to predict for relapse of MDS post-alloSCT. Pre-transplant TP53 mutations were associated with a very poor outcome with 3-year overall survival of less than 20% and a median survival time of 0.7 years. See Lindsley et al. (2017) N Engl J Med. 376(6):536-547 and Ciurea et al. (2018) Blood 131(26):2989-2992. Other mutations related to the RAS-pathway, JAK2, RUNX1, and ASXL1 were also associated with poor outcome after alloSCT. See Lindsley et al. (2017) N Engl J Med. 376(6):536-547 and Della Porta et al. (2016) J Clin Oncol. 34(30):3627-3637.

### 3. Acute Lymphoblastic Leukemia (ALL)

[0227] AlloSCT for ALL with active disease or primary induction failure only achieved 16% long-term survival at three years, as 41% of patients died before six months from relapsed ALL. See Duval et al. (2010) J Clin Oncol. 28(23):3730-3738.

### 4. Additional Diseased and Conditions

[0228] Additional diseases or condition can be treated using the described TCRs, T cells, and methods. The diseases or conditions include, but are not limited to, liquid tumors, hematopoietic tumors, lymphomas, and CML.

[0229] In some embodiments, the described described TCRs and T cells may be used in bone marrow transplantations, such as for autoimmune disorders, solid tumor treatments, and immune system replacements. The described T cells may be combined with other adoptive cell therapies that are targeted to solid tumors, or autoimmune diseases or conditions. The described T cells may be used as a preliminary or concurrent treatment or additive to reduce, inhibit, or eliminate the recipient's natural immune response or immune cells.

### B. Allogeneic Stem Cell Transplantation and Risk of Relapse

[0230] Over 9000 alloSCTs were performed in the United States in 2019, mostly as a potentially curative treatment for patients with various hematologic malignancies. See D'Souza et al. (2020) Biol Blood Marrow Transplant J Am Soc Blood Marrow Transplant 26(8):e177-e182. Post-transplant relapse remains the major cause of transplant failure occurring in 20-40% of standard risk and in 40-80% of high-risk patients, accounting for more than half of deaths after alloSCT. See Horowitz et al. (2018) Bone Marrow Transpl. 53(11): 1379-1389. There is an urgent need to prolong recurrence-free survival (RFS) times through new strategies to enhance GVL without causing severe GVHD. There also is an urgent need to prevent and treat post-transplant relapse through new strategies to enhance GVL without causing severe GVHD.

[0231] The number of relapses in patients currently transplanted likely underestimates the unmet needs. An analysis of patients with AML is illustrative of this point. In 2018, more than 3,000 alloSCTs were performed for AML in the United States. However, during the same period, there were approximately 21,450 new cases of AML, with an estimated 11,000 yearly deaths. The decision to refer a patient for an alloSCT depends on the benefit of relapse control relative to the risks of treatment-related mortality (TRM). If a new therapy results in a lower rate of relapse without an increase in significant toxicities and TRM, then more subjects would likely be referred for that therapy.

[0232] Relapse is the most common cause of death after alloSCT in every type of hematologic malignancy. Since the outcome of post-transplant relapse is extremely poor, RFS or cumulative relapse can be used as reliable surrogate endpoints for survival in alloSCT. The most powerful predictor for relapse is measurable residual disease (MRD) at the time of alloSCT. Even if the disease burden is low (i.e., less than 5% of the bone marrow), the outcomes are as poor as in the patients with overt active disease. See Araki et al. (2016) J Clin Oncol. 34(4):329-336.

### C. Additional Therapy Considerations

[0233] In some aspects, although unlikely, it is possible for miHA TCRs to display a lack of specificity or exhibit on target/off tumor effects. The latter may emerge when the HA-1 target is sufficiently expressed in nonhematopoietic tissues. Strategies and methods, which should not be construed as limiting, are provided herein to address such occurrences.

[0234] If GVHD occurs following administration of a miHA TCR, standard of care immunosuppressive therapies would be initiated. As a built in safety mechanism, the engineered cells described herein may comprise an extracellular membrane-bound marker containing a CD20 epitope. The CD20 epitope is recognized by certain antibodies, including, for example, the monoclonal antibody RITUXANR (rituximab). Recognition of the CD20 epitope may allow for selective deletion of the engineered cells. This strategy may be employed in combination with standard of care interventions to reduce GVHD.

[0235] While cytokine release syndrome (CRS) has occurred after CAR-T cell infusions, the risk of CRS is less likely for TCR cell therapy. Even so, CRS remains a possibility, especially if transduced cells are rapidly and synchronously activated. If CRS occurs, as defined by the American Society for Transplantation and Cellular Therapy (ASTCT) consensus grading guidelines, standard of care therapies would be initiated. Such treatments include, for example, administration of antibodies that block IL-6 function and/or corticosteroids. See Lee et al. (2019) Biol Blood Marrow Transpl. 25(4):625-638.

### VI. Definitions

[0236] Unless defined otherwise, all terms of art, notations and other technical and scientific terms or terminology used herein are intended to have the same meaning as is commonly understood by one of ordinary skill in the art to which the claimed subject matter pertains. In some cases, terms with commonly understood meanings are defined herein for clarity and/or for ready reference, and the inclusion of such definitions herein should not necessarily be construed to represent a substantial difference over what is generally understood in the art.

[0237] The terms “polypeptide” and “protein” are used interchangeably to refer to a polymer of amino acid residues, and are not limited to a minimum length. Polypeptides, including the provided T cell receptors, antigen binding fragments thereof and other peptides, e.g., linkers, may include amino acid residues including natural and/or non-natural amino acid residues. The terms also include post-expression modifications of the polypeptide, for example, glycosylation, sialylation, acetylation, phosphorylation, and the like. In some aspects, the polypeptides may contain modifications with respect to a native or natural sequence, as long as the protein maintains the desired activity. These modifications may be deliberate, as through site-directed mutagenesis, or may be accidental, such as through mutations of hosts which produce the proteins or errors due to PCR amplification.

[0238] An “isolated” nucleic acid refers to a nucleic acid molecule that has been separated from a component of its natural environment. An isolated nucleic acid includes a nucleic acid molecule contained in cells that ordinarily contain the nucleic acid molecule, but the nucleic acid molecule is present extrachromosomally or at a chromosomal location that is different from its natural chromosomal location.

[0239] “An isolated nucleic acid molecule encoding a TCR” refers to a single nucleic acid molecule (e.g., single vector) that encodes a TCR such as a functional α/β TCR or a functional γ/δ TCR.

[0240] “An isolated nucleic acid molecule encoding an antigen binding fragment of a TCR” refers to a single nucleic acid molecule (e.g., single vector) that encodes an antigen binding fragment of a TCR.

[0241] “Isolated nucleic acid molecules encoding a TCR” refers to two or more separate nucleic acid molecules (e.g., two or more vectors) that together encode a TCR such as a functional α/β TCR or a functional γ/δ TCR. Each of such two or more nucleic acid molecules can be present at different locations within a host cell.

[0242] “Isolated nucleic acid molecules encoding an antigen binding fragment of a TCR” refers to two or more nucleic acid molecules (e.g., two or more vectors) that together encode an antigen binding fragment of a TCR. Each of such two or more nucleic acid molecules can be present at different locations within a host cell.

[0243] The terms “host cell,” “host cell line,” and “host cell culture” are used interchangeably and refer to cells into which exogenous nucleic acid has been introduced, including the progeny of such cells. Host cells include “transformants” and “transformed cells,” which include the primary transformed cell and progeny derived therefrom without regard to the number of passages. Progeny may not be completely identical in nucleic acid content to a parent cell, but may contain mutations. Mutant progeny that have the same function or biological activity as screened or selected for in the originally transformed cell are included herein.

[0244] As used herein, “percent (%) amino acid sequence identity” and “percent identity” when used with respect to an amino acid sequence (reference polypeptide sequence) is defined as the percentage of amino acid residues in a candidate sequence (e.g., the subject T cell receptor or fragment) that are identical with the amino acid residues in the reference polypeptide sequence, after aligning the sequences and introducing gaps, if necessary, to achieve the maximum percent sequence identity, and not considering any conservative substitutions as part of the sequence identity. Alignment for purposes of determining percent amino acid sequence identity can be achieved in various ways that are within the skill in the art, for instance, using publicly available computer software such as BLAST, BLAST-2, ALIGN or Megalign (DNASTAR) software. Those skilled in the art can determine appropriate parameters for aligning sequences, including any algorithms needed to achieve maximal alignment over the full length of the sequences being compared.

[0245] An amino acid substitution may include replacement of one amino acid in a polypeptide with another amino acid. Amino acid substitutions may be introduced into a TCR or antigen binding fragment thereof, of interest and the products screened for a desired activity, e.g., retained/improved antigen binding, decreased immunogenicity, or improved cytolytic activity.

[0246] Amino acids generally can be grouped according to the following common side-chain properties:
[0247] (1) hydrophobic: Norleucine, Met, Ala, Val, Leu, Ile;
[0248] (2) neutral hydrophilic: Cys, Ser, Thr, Asn, Gln;
[0249] (3) acidic: Asp, Glu;
[0250] (4) basic: His, Lys, Arg;
[0251] (5) residues that influence chain orientation: Gly, Pro; and
[0252] (6) aromatic: Trp, Tyr, Phe.

[0253] In some embodiments, conservative substitutions can involve the exchange of a member of one of these classes for another member of the same class. In some embodiments, non-conservative amino acid substitutions can involve exchanging a member of one of these classes for another class.

[0254] The term “vector,” as used herein, refers to a nucleic acid molecule capable of propagating another nucleic acid to which it is linked. The term includes the vector as a self-replicating nucleic acid structure as well as the vector incorporated into the genome of a host cell into which it has been introduced. Certain vectors are capable of directing the expression of nucleic acids to which they are operatively linked. Such vectors are referred to herein as “expression vectors.”

[0255] As used herein, the singular forms “a,” “an,” and “the” include plural referents unless the context clearly dictates otherwise. For example, “a” or “an” means “at least one” or “one or more.” It is understood that aspects and variations described herein include “consisting” and/or “consisting essentially of” aspects and variations.

[0256] Throughout this disclosure, various aspects of the claimed subject matter are presented in a range format. It should be understood that the description in range format is merely for convenience and brevity and should not be construed as an inflexible limitation on the scope of the claimed subject matter. Accordingly, the description of a range should be considered to have specifically disclosed all the possible sub-ranges as well as individual numerical values within that range. For example, where a range of values is provided, it is understood that each intervening value, between the upper and lower limit of that range and any other stated or intervening value in that stated range is encompassed within the claimed subject matter. The upper and lower limits of these smaller ranges may independently be included in the smaller ranges, and are also encompassed within the claimed subject matter, subject to any specifically excluded limit in the stated range. Where the stated range includes one or both of the limits, ranges excluding either or both of those included limits are also included in the claimed subject matter. This applies regardless of the breadth of the range.

[0257] The term “about” as used herein refers to the usual error range for the respective value readily known to the skilled person in this technical field. Reference to “about” a value or parameter herein includes (and describes) embodiments that are directed to that value or parameter per se. For example, description referring to “about X” includes description of “X”

[0258] As used herein, a composition refers to any mixture of two or more products, substances, or compounds, including cells. It may be a solution, a suspension, liquid, powder, a paste, aqueous, non-aqueous or any combination thereof.

[0259] As used herein, a statement that a cell or population of cells is “positive” for a particular marker refers to the detectable presence on or in the cell of a particular marker, typically a surface marker. When referring to a surface marker, the term refers to the presence of surface expression as detected by flow cytometry, for example, by staining with an antibody that specifically binds to the marker and detecting said antibody, wherein the staining is detectable by flow cytometry at a level substantially above the staining detected carrying out the same procedure with an isotype-matched control under otherwise identical conditions and/or at a level substantially similar to that for cell known to be positive for the marker, and/or at a level substantially higher than that for a cell known to be negative for the marker.

[0260] As used herein, a statement that a cell or population of cells is “negative” for a particular marker refers to the absence of substantial detectable presence on or in the cell of a particular marker, typically a surface marker. When referring to a surface marker, the term refers to the absence of surface expression as detected by flow cytometry, for example, by staining with an antibody that specifically binds to the marker and detecting said antibody, wherein the staining is not detected by flow cytometry at a level substantially above the staining detected carrying out the same procedure with an isotype-matched control under otherwise identical conditions, and/or at a level substantially lower than that for cell known to be positive for the marker, and/or at a level substantially similar as compared to that for a cell known to be negative for the marker.

### VII. Exemplary Embodiments

[0261] Among the provided embodiments are:
[0262] 1. A T cell receptor (TCR) or antigen-binding fragment thereof, comprising:
[0263] an alpha chain comprising a variable alpha (Vα) region and a beta chain comprising a variable beta (Vβ) region; or
[0264] a gamma chain comprising a variable gamma (Vγ) region and a delta chain comprising a variable delta (Vδ) region; wherein:
[0265] (a) the Vα or Vγ region comprises a complementarity determining region 3 (CDR-3) comprising SEQ ID NO:3, and the Vβ or Vδ region comprises a CDR-3 comprising SEQ ID NO:11;
[0266] (b) the Vα or Vγ region comprises a CDR-3 comprising SEQ ID NO:21, and the Vβ or Vδ region comprises a CDR-3 comprising SEQ ID NO:27;
[0267] (c) the Vα or Vγ region comprises a CDR-3 comprising SEQ ID NO:37, and the Vβ or Vδ region comprises a CDR-3 comprising SEQ ID NO:43;
[0268] (d) the Vα or Vγ region comprises a CDR-3 comprising SEQ ID NO:51, and the Vβ or Vδ region comprises a CDR-3 comprising SEQ ID NO:57;
[0269] (e) the Vα or Vγ region comprises a CDR-3 comprising SEQ ID NO:65, and the Vβ or Vδ region comprises a CDR-3 comprising SEQ ID NO:57;
[0270] (f) the Vα or Vγ region comprises a CDR-3 comprising SEQ ID NO:78, and the Vβ or Vδ region comprises a CDR-3 comprising SEQ ID NO:84;
[0271] (g) the Vα or Vγ region comprises a CDR-3 comprising SEQ ID NO:92, and the Vβ or Vδ region comprises a CDR-3 comprising SEQ ID NO:98;
[0272] (h) the Vα or Vγ region comprises a CDR-3 comprising SEQ ID NO:106, and the Vβ or Vδ region comprises a CDR-3 comprising SEQ ID NO:112;
[0273] (i) the Vα or Vγ region comprises a CDR-3 comprising SEQ ID NO:120, and the Vβ or Vδ region comprises a CDR-3 comprising SEQ ID NO:126;
[0274] (j) the Vα or Vγ region comprises a CDR-3 comprising SEQ ID NO:136, and the Vβ or Vδ region comprises a CDR-3 comprising SEQ ID NO:142;
[0275] (k) the Vα or Vγ region comprises a CDR-3 comprising SEQ ID NO:152, and the Vβ or Vδ region comprises a CDR-3 comprising SEQ ID NO:158;
[0276] (l) the Vα or Vγ region comprises a CDR-3 comprising SEQ ID NO:166, and the Vβ or Vδ region comprises a CDR-3 comprising SEQ ID NO:172;
[0277] (m) the Vα or Vγ region comprises a CDR-3 comprising SEQ ID NO:180, and the Vβ or Vδ region comprises a CDR-3 comprising SEQ ID NO:186;
[0278] (n) the Vα or Vγ region comprises a CDR-3 comprising SEQ ID NO:194, and the Vβ or Vδ region comprises a CDR-3 comprising SEQ ID NO:200;
[0279] (o) the Vα or Vγ region comprises a CDR-3 comprising SEQ ID NO:208, and the Vβ or Vδ region comprises a CDR-3 comprising SEQ ID NO:214;
[0280] (p) the Vα or Vγ region comprises a CDR-3 comprising SEQ ID NO:224, and the Vβ or Vδ region comprises a CDR-3 comprising SEQ ID NO:230;
[0281] (q) the Vα or Vγ region comprises a CDR-3 comprising SEQ ID NO:238, and the Vβ or Vδ region comprises a CDR-3 comprising SEQ ID NO:244;
[0282] (r) the Vα or Vγ region comprises a CDR-3 comprising SEQ ID NO:252, and the Vβ or Vδ region comprises a CDR-3 comprising SEQ ID NO:258;
[0283] (s) the Vα or Vγ region comprises a CDR-3 comprising SEQ ID NO:268, and the Vβ or Vδ region comprises a CDR-3 comprising SEQ ID NO:158;
[0284] (t) the Vα or Vγ region comprises a CDR-3 comprising SEQ ID NO:278, and the Vβ or Vδ region comprises a CDR-3 comprising SEQ ID NO:284;
[0285] (u) the Vα or Vγ region comprises a CDR-3 comprising SEQ ID NO:359, and the Vβ or Vδ region comprises a CDR-3 comprising SEQ ID NO:363;
[0286] (v) the Vα or Vγ region comprises a CDR-3 comprising SEQ ID NO:369, and the Vβ or Vδ region comprises a CDR-3 comprising SEQ ID NO:373;
[0287] (w) the Vα or Vγ region comprises a CDR-3 comprising SEQ ID NO:379, and the Vβ or Vδ region comprises a CDR-3 comprising SEQ ID NO:383;
[0288] (x) the Vα or Vγ region comprises a CDR-3 comprising SEQ ID NO:389, and the Vβ or Vδ region comprises a CDR-3 comprising SEQ ID NO:393;
[0289] (y) the Vα or Vγ region comprises a CDR-3 comprising SEQ ID NO:399, and the Vβ or Vδ region comprises a CDR-3 comprising SEQ ID NO:403;
[0290] (z) the Vα or Vγ region comprises a CDR-3 comprising SEQ ID NO:409, and the Vβ or Vδ region comprises a CDR-3 comprising SEQ ID NO:413;
[0291] (aa) the Vα or Vγ region comprises a CDR-3 comprising SEQ ID NO:419, and the Vβ or Vδ region comprises a CDR-3 comprising SEQ ID NO:423;
[0292] (ab) the Vα or Vγ region comprises a CDR-3 comprising SEQ ID NO:429, and the Vβ or Vδ region comprises a CDR-3 comprising SEQ ID NO:433;
[0293] (ac) the Vα or Vγ region comprises a CDR-3 comprising SEQ ID NO:439, and the Vβ or Vδ region comprises a CDR-3 comprising SEQ ID NO:443;
[0294] (ad) the Vα or Vγ region comprises a CDR-3 comprising SEQ ID NO:449, and the Vβ or Vδ region comprises a CDR-3 comprising SEQ ID NO:453; or
[0295] (ac) the Vα or Vγ region comprises a CDR-3 comprising SEQ ID NO:480, and the Vβ or Vδ region comprises a CDR-3 comprising SEQ ID NO:484.
[0296] 2. The TCR or antigen-binding fragment thereof of embodiment 1, wherein:
[0297] (a) the Vα or Vγ region comprises a complementarity determining region 1 (CDR-1) comprising SEQ ID NO:1, and a complementarity determining region 2 (CDR-2) comprising SEQ ID NO:2, and the Vβ or Vδ region comprises a CDR-1 comprising SEQ ID NO:9, and a CDR-2 comprising SEQ ID NO:10;
[0298] (b) the Vα or Vγ region comprises a CDR-1 comprising SEQ ID NO:19, and a CDR-2 comprising SEQ ID NO:20, and the Vβ or Vδ region comprises a CDR-1 comprising SEQ ID NO:9, and a CDR-2 comprising SEQ ID NO:10;
[0299] (c) the Vα or Vγ region comprises a CDR-1 comprising SEQ ID NO:35, and a CDR-2 comprising SEQ ID NO:36, and the Vβ or Vδ region comprises a CDR-1 comprising SEQ ID NO:9, and a CDR-2 comprising SEQ ID NO:10;
[0300] (d) the Vα or Vγ region comprises a CDR-1 comprising SEQ ID NO:1, and a CDR-2 comprising SEQ ID NO:2, and the Vβ or Vδ region comprises a CDR-1 comprising SEQ ID NO:9, and a CDR-2 comprising SEQ ID NO:10;
[0301] (e) the Vα or Vγ region comprises a CDR-1 comprising SEQ ID NO:1, and a CDR-2 comprising SEQ ID NO:2, and the Vβ or Vδ region comprises a CDR-1 comprising SEQ ID NO:9, and a CDR-2 comprising SEQ ID NO:10;
[0302] (f) the Vα or Vγ region comprises a CDR-1 comprising SEQ ID NO:76, and a CDR-2 comprising SEQ ID NO:77, and the Vβ or Vδ region comprises a CDR-1 comprising SEQ ID NO:9, and a CDR-2 comprising SEQ ID NO:10;
[0303] (g) the Vα or Vγ region comprises a CDR-1 comprising SEQ ID NO:19, and a CDR-2 comprising SEQ ID NO:20, and the Vβ or Vδ region comprises a CDR-1 comprising SEQ ID NO:9, and a CDR-2 comprising SEQ ID NO:10;
[0304] (h) the Vα or Vγ region comprises a CDR-1 comprising SEQ ID NO:76, and a CDR-2 comprising SEQ ID NO:77, and the Vβ or Vδ region comprises a CDR-1 comprising SEQ ID NO:9, and a CDR-2 comprising SEQ ID NO:10;
[0305] (i) the Vα or Vγ region comprises a CDR-1 comprising SEQ ID NO:35, and a CDR-2 comprising SEQ ID NO:36, and the Vβ or Vo region comprises a CDR-1 comprising SEQ ID NO:9, and a CDR-2 comprising SEQ ID NO:10;
[0306] (j) the Vα or Vγ region comprises a CDR-1 comprising SEQ ID NO:134, and a CDR-2 comprising SEQ ID NO:135, and the Vβ or Vδ region comprises a CDR-1 comprising SEQ ID NO:9, and a CDR-2 comprising SEQ ID NO:10;
[0307] (k) the Vα or Vγ region comprises a CDR-1 comprising SEQ ID NO:150, and a CDR-2 comprising SEQ ID NO:151, and the Vβ or Vo region comprises a CDR-1 comprising SEQ ID NO:9, and a CDR-2 comprising SEQ ID NO:10;
[0308] (l) the Vα or Vγ region comprises a CDR-1 comprising SEQ ID NO:35, and a CDR-2 comprising SEQ ID NO:36, and the Vβ or Vδ region comprises a CDR-1 comprising SEQ ID NO:9, and a CDR-2 comprising SEQ ID NO:10;
[0309] (m) the Vα or Vγ region comprises a CDR-1 comprising SEQ ID NO:35, and a CDR-2 comprising SEQ ID NO:36, and the Vβ or Vδ region comprises a CDR-1 comprising SEQ ID NO:9, and a CDR-2 comprising SEQ ID NO:10;
[0310] (n) the Vα or Vγ region comprises a CDR-1 comprising SEQ ID NO:76, and a CDR-2 comprising SEQ ID NO:77, and the Vβ or Vδ region comprises a CDR-1 comprising SEQ ID NO:9, and a CDR-2 comprising SEQ ID NO:10;
[0311] (o) the Vα or Vγ region comprises a CDR-1 comprising SEQ ID NO:76, and a CDR-2 comprising SEQ ID NO:77, and the Vβ or Vo region comprises a CDR-1 comprising SEQ ID NO:9, and a CDR-2 comprising SEQ ID NO:10;
[0312] (p) the Vα or Vγ region comprises a CDR-1 comprising SEQ ID NO:222, and a CDR-2 comprising SEQ ID NO:223, and the Vβ or Vδ region comprises a CDR-1 comprising SEQ ID NO:9, and a CDR-2 comprising SEQ ID NO: 10;
[0313] (q) the Vα or Vγ region comprises a CDR-1 comprising SEQ ID NO:76, and a CDR-2 comprising SEQ ID NO:77, and the Vβ or Vo region comprises a CDR-1 comprising SEQ ID NO:9, and a CDR-2 comprising SEQ ID NO:10;
[0314] (r) the Vα or Vγ region comprises a CDR-1 comprising SEQ ID NO:19, and a CDR-2 comprising SEQ ID NO:20, and the Vβ or Vδ region comprises a CDR-1 comprising SEQ ID NO:9, and a CDR-2 comprising SEQ ID NO:10;
[0315] (s) the Vα or Vγ region comprises a CDR-1 comprising SEQ ID NO:266, and a CDR-2 comprising SEQ ID NO:267, and the Vβ or Vδ region comprises a CDR-1 comprising SEQ ID NO:9, and a CDR-2 comprising SEQ ID NO:10; or
[0316] (t) the Vα or Vγ region comprises a CDR-1 comprising SEQ ID NO:19, and a CDR-2 comprising SEQ ID NO:20, and the Vβ or Vδ region comprises a CDR-1 comprising SEQ ID NO:9, and a CDR-2 comprising SEQ ID NO:10.
[0317] 3. A T cell receptor (TCR) or antigen-binding fragment thereof, comprising:
[0318] an alpha chain comprising a variable alpha (Vα) region and a beta chain comprising a variable beta (Vβ) region; or
[0319] a gamma chain comprising a variable gamma (Vγ) region and a delta chain comprising a variable delta (Vδ) region; wherein:
[0320] (a) the Vα or Vγ region comprises a complementarity determining region 1 (CDR-1) comprising SEQ ID NO:1, a complementarity determining region 2 (CDR-2) comprising SEQ ID NO:2, and a complementarity determining region 3 (CDR-3) comprising SEQ ID NO:3, and the Vβ or Vδ region comprises a CDR-1 comprising SEQ ID NO:9, a CDR-2 comprising SEQ ID NO:10, and a CDR-3 comprising SEQ ID NO:11;
[0321] (b) the Vα or Vγ region comprises a CDR-1 comprising SEQ ID NO:19, a CDR-2 comprising SEQ ID NO:20, and a CDR-3 comprising SEQ ID NO:21, and the Vβ or Vδ region comprises a CDR-1 comprising SEQ ID NO:9, a CDR-2 comprising SEQ ID NO:10, and a CDR-3 comprising SEQ ID NO:27;
[0322] (c) the Vα or Vγ region comprises a CDR-1 comprising SEQ ID NO:35, a CDR-2 comprising SEQ ID NO:36, and a CDR-3 comprising SEQ ID NO:37, and the Vβ or Vδ region comprises a CDR-1 comprising SEQ ID NO:9, a CDR-2 comprising SEQ ID NO:10, and a CDR-3 comprising SEQ ID NO:43;
[0323] (d) the Vα or Vγ region comprises a CDR-1 comprising SEQ ID NO:1, a CDR-2 comprising SEQ ID NO:2, and a CDR-3 comprising SEQ ID NO:51, and the Vβ or Vδ region comprises a CDR-1 comprising SEQ ID NO:9, a CDR-2 comprising SEQ ID NO:10, and a CDR-3 comprising SEQ ID NO:57;
[0324] (e) the Vα or Vγ region comprises a CDR-1 comprising SEQ ID NO:1, a CDR-2 comprising SEQ ID NO:2, and a CDR-3 comprising SEQ ID NO:65, and the Vβ or Vδ region comprises a CDR-1 comprising SEQ ID NO:9, a CDR-2 comprising SEQ ID NO:10, and a CDR-3 comprising SEQ ID NO:57;
[0325] (f) the Vα or Vγ region comprises a CDR-1 comprising SEQ ID NO:76, a CDR-2 comprising SEQ ID NO:77, and a CDR-3 comprising SEQ ID NO:78, and the Vβ or Vδ region comprises a CDR-1 comprising SEQ ID NO:9, a CDR-2 comprising SEQ ID NO:10, and a CDR-3 comprising SEQ ID NO:84;
[0326] (g) the Vα or Vγ region comprises a CDR-1 comprising SEQ ID NO:19, a CDR-2 comprising SEQ ID NO:20, and a CDR-3 comprising SEQ ID NO:92, and the Vβ or Vδ region comprises a CDR-1 comprising SEQ ID NO:9, a CDR-2 comprising SEQ ID NO:10, and a CDR-3 comprising SEQ ID NO:98;
[0327] (h) the Vα or Vγ region comprises a CDR-1 comprising SEQ ID NO:76, a CDR-2 comprising SEQ ID NO:77, and a CDR-3 comprising SEQ ID NO:106, and the Vβ or Vδ region comprises a CDR-1 comprising SEQ ID NO:9, a CDR-2 comprising SEQ ID NO:10, and a CDR-3 comprising SEQ ID NO:112;
[0328] (i) the Vα or Vγ region comprises a CDR-1 comprising SEQ ID NO:35, a CDR-2 comprising SEQ ID NO:36, and a CDR-3 comprising SEQ ID NO:120, and the Vβ or Vδ region comprises a CDR-1 comprising SEQ ID NO:9, a CDR-2 comprising SEQ ID NO:10, and a CDR-3 comprising SEQ ID NO:126;
[0329] (j) the Vα or Vγ region comprises a CDR-1 comprising SEQ ID NO:134, a CDR-2 comprising SEQ ID NO:135, and a CDR-3 comprising SEQ ID NO:136, and the Vβ or Vδ region comprises a CDR-1 comprising SEQ ID NO:9, a CDR-2 comprising SEQ ID NO:10, and a CDR-3 comprising SEQ ID NO:142;
[0330] (k) the Vα or Vγ region comprises a CDR-1 comprising SEQ ID NO:150, a CDR-2 comprising SEQ ID NO:151, and a CDR-3 comprising SEQ ID NO:152, and the Vβ or Vδ region comprises a CDR-1 comprising SEQ ID NO:9, a CDR-2 comprising SEQ ID NO:10, and a CDR-3 comprising SEQ ID NO:158;
[0331] (l) the Vα or Vγ region comprises a CDR-1 comprising SEQ ID NO:35, a CDR-2 comprising SEQ ID NO:36, and a CDR-3 comprising SEQ ID NO:166, and the Vβ or Vδ region comprises a CDR-1 comprising SEQ ID NO:9, a CDR-2 comprising SEQ ID NO:10, and a CDR-3 comprising SEQ ID NO:172;
[0332] (m) the Vα or Vγ region comprises a CDR-1 comprising SEQ ID NO:35, a CDR-2 comprising SEQ ID NO:36, and a CDR-3 comprising SEQ ID NO:180, and the Vβ or Vδ region comprises a CDR-1 comprising SEQ ID NO:9, a CDR-2 comprising SEQ ID NO:10, and a CDR-3 comprising SEQ ID NO:186;
[0333] (n) the Vα or Vγ region comprises a CDR-1 comprising SEQ ID NO:76, a CDR-2 comprising SEQ ID NO:77, and a CDR-3 comprising SEQ ID NO:194, and the Vβ or Vδ region comprises a CDR-1 comprising SEQ ID NO:9, a CDR-2 comprising SEQ ID NO:10, and a CDR-3 comprising SEQ ID NO:200;
[0334] (o) the Vα or Vγ region comprises a CDR-1 comprising SEQ ID NO:76, a CDR-2 comprising SEQ ID NO:77, and a CDR-3 comprising SEQ ID NO:208, and the Vβ or Vδ region comprises a CDR-1 comprising SEQ ID NO:9, a CDR-2 comprising SEQ ID NO:10, and a CDR-3 comprising SEQ ID NO:214;
[0335] (p) the Vα or Vγ region comprises a CDR-1 comprising SEQ ID NO:222, a CDR-2 comprising SEQ ID NO:223, and a CDR-3 comprising SEQ ID NO:224, and the Vβ or Vδ region comprises a CDR-1 comprising SEQ ID NO:9, a CDR-2 comprising SEQ ID NO:10, and a CDR-3 comprising SEQ ID NO:230;
[0336] (q) the Vα or Vγ region comprises a CDR-1 comprising SEQ ID NO:76, a CDR-2 comprising SEQ ID NO:77, and a CDR-3 comprising SEQ ID NO:238, and the Vβ or Vδ region comprises a CDR-1 comprising SEQ ID NO:9, a CDR-2 comprising SEQ ID NO:10, and a CDR-3 comprising SEQ ID NO:244;
[0337] (r) the Vα or Vγ region comprises a CDR-1 comprising SEQ ID NO:19, a CDR-2 comprising SEQ ID NO:20, and a CDR-3 comprising SEQ ID NO:252, and the Vβ or Vδ region comprises a CDR-1 comprising SEQ ID NO:9, a CDR-2 comprising SEQ ID NO:10, and a CDR-3 comprising SEQ ID NO:258;
[0338] (s) the Vα or Vγ region comprises a CDR-1 comprising SEQ ID NO:266, a CDR-2 comprising SEQ ID NO:267, and a CDR-3 comprising SEQ ID NO:268, and the Vβ or Vδ region comprises a CDR-1 comprising SEQ ID NO:9, a CDR-2 comprising SEQ ID NO:10, and a CDR-3 comprising SEQ ID NO: 158; or
[0339] (t) the Vα or Vγ region comprises a CDR-1 comprising SEQ ID NO:19, a CDR-2 comprising SEQ ID NO:20, and a CDR-3 comprising SEQ ID NO:278, and the Vβ or Vδ region comprises a CDR-1 comprising SEQ ID NO:9, a CDR-2 comprising SEQ ID NO:10, and a CDR-3 comprising SEQ ID NO:284.
[0340] 4. A T cell receptor (TCR) or antigen-binding fragment thereof, comprising:
   [0341] an alpha chain comprising a variable alpha (Vα) region and a beta chain comprising a variable beta (Vβ) region; or
   [0342] a gamma chain comprising a variable gamma (Vγ) region and a delta chain comprising a variable delta (Vδ) region; wherein:
[0343] (a) the Vα or Vγ region comprises a complementarity determining region 3 (CDR-3) comprising a CDR-3 contained within the Vα or Vγ region sequence of SEQ ID NO:4, and the Vβ or Vδ region comprises a CDR-3 comprising a CDR-3 contained within the Vβ or Vδ region sequence of SEQ ID NO:12;
[0344] (b) the Vα or Vγ region comprises a CDR-3 comprising a CDR-3 contained within the Vα or Vγ region sequence of SEQ ID NO:22, and the Vβ or Vδ region comprises a CDR-3 comprising a CDR-3 contained within the Vβ or Vδ region sequence of SEQ ID NO:28;
[0345] (c) the Vα or Vγ region comprises a CDR-3 comprising a CDR-3 contained within the Vα or Vγ region sequence of SEQ ID NO:38, and the Vβ or Vδ region comprises a CDR-3 comprising a CDR-3 contained within the Vβ or Vδ region sequence of SEQ ID NO:44;
[0346] (d) the Vα or Vγ region comprises a CDR-3 comprising a CDR-3 contained within the Vα or Vγ region sequence of SEQ ID NO:52, and the Vβ or Vδ region comprises a CDR-3 comprising a CDR-3 contained within the Vβ or Vδ region sequence of SEQ ID NO:58;
[0347] (e) the Vα or Vγ region comprises a CDR-3 comprising a CDR-3 contained within the Vα or Vγ region sequence of SEQ ID NO:66, and the Vβ or Vδ region comprises a CDR-3 comprising a CDR-3 contained within the Vβ or Vδ region sequence of SEQ ID NO:58;
[0348] (f) the Vα or Vγ region comprises a CDR-3 comprising a CDR-3 contained within the Vα or Vγ region sequence of SEQ ID NO:79, and the Vβ or Vδ region comprises a CDR-3 comprising a CDR-3 contained within the Vβ or Vδ region sequence of SEQ ID NO:85;
[0349] (g) the Vα or Vγ region comprises a CDR-3 comprising a CDR-3 contained within the Vα or Vγ region sequence of SEQ ID NO:93, and the Vβ or Vδ region comprises a CDR-3 comprising a CDR-3 contained within the Vβ or Vδ region sequence of SEQ ID NO:99;
[0350] (h) the Vα or Vγ region comprises a CDR-3 comprising a CDR-3 contained within the Vα or Vγ region sequence of SEQ ID NO:107, and the Vβ or Vδ region comprises a CDR-3 comprising a CDR-3 contained within the Vβ or Vδ region sequence of SEQ ID NO:113;
[0351] (i) the Vα or Vγ region comprises a CDR-3 comprising a CDR-3 contained within the Vα or Vγ region sequence of SEQ ID NO:121, and the Vβ or Vo region comprises a CDR-3 comprising a CDR-3 contained within the Vβ or Vδ region sequence of SEQ ID NO:127;
[0352] (j) the Vα or Vγ region comprises a CDR-3 comprising a CDR-3 contained within the Vα or Vγ region sequence of SEQ ID NO:137, and the Vβ or Vo region comprises a CDR-3 comprising a CDR-3 contained within the Vβ or Vδ region sequence of SEQ ID NO:143;
[0353] (k) the Vα or Vγ region comprises a CDR-3 comprising a CDR-3 contained within the Vα or Vγ region sequence of SEQ ID NO: 153, and the Vβ or Vδ region comprises a CDR-3 comprising a CDR-3 contained within the Vβ or Vδ region sequence of SEQ ID NO:159;
[0354] (l) the Vα or Vγ region comprises a CDR-3 comprising a CDR-3 contained within the Vα or Vγ region sequence of SEQ ID NO: 167, and the Vβ or Vδ region comprises a CDR-3 comprising a CDR-3 contained within the Vβ or Vδ region sequence of SEQ ID NO:173;
[0355] (m) the Vα or Vγ region comprises a CDR-3 comprising a CDR-3 contained within the Vα or Vγ region sequence of SEQ ID NO:181, and the Vβ or Vδ region comprises a CDR-3 comprising a CDR-3 contained within the Vβ or Vδ region sequence of SEQ ID NO:187;
[0356] (n) the Vα or Vγ region comprises a CDR-3 comprising a CDR-3 contained within the Vα or Vγ region sequence of SEQ ID NO:195, and the Vβ or Vδ region comprises a CDR-3 comprising a CDR-3 contained within the Vβ or Vδ region sequence of SEQ ID NO:201;
[0357] (o) the Vα or Vγ region comprises a CDR-3 comprising a CDR-3 contained within the Vα or Vγ region sequence of SEQ ID NO:209, and the Vβ or Vo region comprises a CDR-3 comprising a CDR-3 contained within the Vβ or Vδ region sequence of SEQ ID NO:215;
[0358] (p) the Vα or Vγ region comprises a CDR-3 comprising a CDR-3 contained within the Vα or Vγ region sequence of SEQ ID NO:225, and the Vβ or Vo region comprises a CDR-3 comprising a CDR-3 contained within the Vβ or Vδ region sequence of SEQ ID NO:231;
[0359] (q) the Vα or Vγ region comprises a CDR-3 comprising a CDR-3 contained within the Vα or Vγ region sequence of SEQ ID NO: 239, and the Vβ or Vo region comprises a CDR-3 comprising a CDR-3 contained within the Vβ or Vδ region sequence of SEQ ID NO:245;
[0360] (r) the Vα or Vγ region comprises a CDR-3 comprising a CDR-3 contained within the Vα or Vγ region sequence of SEQ ID NO:253, and the Vβ or Vo region comprises a CDR-3 comprising a CDR-3 contained within the Vβ or Vδ region sequence of SEQ ID NO:259;
[0361] (s) the Vα or Vγ region comprises a CDR-3 comprising a CDR-3 contained within the Vα or Vγ region sequence of SEQ ID NO:269, and the Vβ or Vo region comprises a CDR-3 comprising a CDR-3 contained within the Vβ or Vδ region sequence of SEQ ID NO: 159; or
[0362] (t) the Vα or Vγ region comprises a CDR-3 comprising a CDR-3 contained within the Vα or Vγ region sequence of SEQ ID NO:279, and the Vβ or Vo region comprises a CDR-3 comprising a CDR-3 contained within the Vβ or Vδ region sequence of SEQ ID NO:285.
[0363] 5. The TCR or antigen-binding fragment thereof of embodiment 4, wherein:
[0364] (a) the Vα or Vγ region comprises a complementarity determining region 1 (CDR-1) and a complementarity determining region 2 (CDR-2) comprising a CDR-1 and a CDR-2, respectively, contained within the Vα or Vγ region sequence of SEQ ID NO:4, and the Vβ or Vδ region comprises a CDR-1 and a CDR-2 comprising a CDR-1 and a CDR-2, respectively, contained within the Vβ or Vδ region sequence of SEQ ID NO:12;
[0365] (b) the Vα or Vγ region comprises a CDR-1 and a CDR-2 comprising a CDR-1 and a CDR-2, respectively, contained within the Vα or Vγ region sequence of SEQ ID NO:22, and the Vβ or Vδ region comprises a CDR-1 and a CDR-2 comprising a CDR-1 and a CDR-2, respectively, contained within the Vβ or Vδ region sequence of SEQ ID NO:28;
[0366] (c) the Vα or Vγ region comprises a CDR-1 and a CDR-2 comprising a CDR-1 and a CDR-2, respectively, contained within the Vα or Vγ region sequence of SEQ ID NO:38, and the Vβ or Vo region comprises a CDR-1 and a CDR-2 comprising a CDR-1 and a CDR-2, respectively, contained within the Vβ or Vδ region sequence of SEQ ID NO:44;
[0367] (d) the Vα or Vγ region comprises a CDR-1 and a CDR-2 comprising a CDR-1 and a CDR-2, respectively, contained within the Vα or Vγ region sequence of SEQ ID NO:52, and the Vβ or Vδ region comprises a CDR-1 and a CDR-2 comprising a CDR-1 and a CDR-2, respectively, contained within the Vβ or Vδ region sequence of SEQ ID NO:58;
[0368] (e) the Vα or Vγ region comprises a CDR-1 and a CDR-2 comprising a CDR-1 and a CDR-2, respectively, contained within the Vα or Vγ region sequence of SEQ ID NO:66, and the Vβ or Vδ region comprises a CDR-1 and a CDR-2 comprising a CDR-1 and a CDR-2, respectively, contained within the Vβ or Vδ region sequence of SEQ ID NO:58;
[0369] (f) the Vα or Vγ region comprises a CDR-1 and a CDR-2 comprising a CDR-1 and a CDR-2, respectively, contained within the Vα or Vγ region sequence of SEQ ID NO:79, and the Vβ or Vo region comprises a CDR-1 and a CDR-2 comprising a CDR-1 and a CDR-2, respectively, contained within the Vβ or Vδ region sequence of SEQ ID NO:85;
[0370] (g) the Vα or Vγ region comprises a CDR-1 and a CDR-2 comprising a CDR-1 and a CDR-2, respectively, contained within the Vα or Vγ region sequence of SEQ ID NO:93, and the Vβ or Vδ region comprises a CDR-1 and a CDR-2 comprising a CDR-1 and a CDR-2, respectively, contained within the Vβ or Vδ region sequence of SEQ ID NO:99;
[0371] (h) the Vα or Vγ region comprises a CDR-1 and a CDR-2 comprising a CDR-1 and a CDR-2, respectively, contained within the Vα or Vγ region sequence of SEQ ID NO:107, and the Vβ or Vδ region comprises a CDR-1 and a CDR-2 comprising a CDR-1 and a CDR-2, respectively, contained within the Vβ or Vδ region sequence of SEQ ID NO:113;
[0372] (i) the Vα or Vγ region comprises a CDR-1 and a CDR-2 comprising a CDR-1 and a CDR-2, respectively, contained within the Vα or Vγ region sequence of SEQ ID NO:121, and the Vβ or Vo region comprises a CDR-1 and a CDR-2 comprising a CDR-1 and a CDR-2, respectively, contained within the Vβ or Vδ region sequence of SEQ ID NO:127;
[0373] (j) the Vα or Vγ region comprises a CDR-1 and a CDR-2 comprising a CDR-1 and a CDR-2, respectively, contained within the Vα or Vγ region sequence of SEQ ID NO:137, and the Vβ or Vδ region comprises a CDR-1 and a CDR-2 comprising a CDR-1 and a CDR-2, respectively, contained within the Vβ or Vδ region sequence of SEQ ID NO:143;
[0374] (k) the Vα or Vγ region comprises a CDR-1 and a CDR-2 comprising a CDR-1 and a CDR-2, respectively, contained within the Vα or Vγ region sequence of SEQ ID NO:153, and the Vβ or Vδ region comprises a CDR-1 and a CDR-2 comprising a CDR-1 and a CDR-2, respectively, contained within the Vβ or Vδ region sequence of SEQ ID NO:159;
[0375] (l) the Vα or Vγ region comprises a CDR-1 and a CDR-2 comprising a CDR-1 and a CDR-2, respectively, contained within the Vα or Vγ region sequence of SEQ ID NO:167, and the Vβ or Vδ region comprises a CDR-1 and a CDR-2 comprising a CDR-1 and a CDR-2, respectively, contained within the Vβ or Vδ region sequence of SEQ ID NO:173;
[0376] (m) the Vα or Vγ region comprises a CDR-1 and a CDR-2 comprising a CDR-1 and a CDR-2, respectively, contained within the Vα or Vγ region sequence of SEQ ID NO:181, and the Vβ or Vδ region comprises a CDR-1 and a CDR-2 comprising a CDR-1 and a CDR-2, respectively, contained within the Vβ or Vδ region sequence of SEQ ID NO:187;
[0377] (n) the Vα or Vγ region comprises a CDR-1 and a CDR-2 comprising a CDR-1 and a CDR-2, respectively, contained within the Vα or Vγ region sequence of SEQ ID NO:195, and the Vβ or Vδ region comprises a CDR-1 and a CDR-2 comprising a CDR-1 and a CDR-2, respectively, contained within the Vβ or Vδ region sequence of SEQ ID NO:201;
[0378] (o) the Vα or Vγ region comprises a CDR-1 and a CDR-2 comprising a CDR-1 and a CDR-2, respectively, contained within the Vα or Vγ region sequence of SEQ ID NO:209, and the Vβ or Vδ region comprises a CDR-1 and a CDR-2 comprising a CDR-1 and a CDR-2, respectively, contained within the Vβ or Vδ region sequence of SEQ ID NO:215;
[0379] (p) the Vα or Vγ region comprises a CDR-1 and a CDR-2 comprising a CDR-1 and a CDR-2, respectively, contained within the Vα or Vγ region sequence of SEQ ID NO:225, and the Vβ or Vδ region comprises a CDR-1 and a CDR-2 comprising a CDR-1 and a CDR-2, respectively, contained within the Vβ or Vδ region sequence of SEQ ID NO:231;
[0380] (q) the Vα or Vγ region comprises a CDR-1 and a CDR-2 comprising a CDR-1 and a CDR-2, respectively, contained within the Vα or Vγ region sequence of SEQ ID NO:239, and the Vβ or Vδ region comprises a CDR-1 and a CDR-2 comprising a CDR-1 and a CDR-2, respectively, contained within the Vβ or Vδ region sequence of SEQ ID NO:245;
[0381] (r) the Vα or Vγ region comprises a CDR-1 and a CDR-2 comprising a CDR-1 and a CDR-2, respectively, contained within the Vα or Vγ region sequence of SEQ ID NO:253, and the Vβ or Vδ region comprises a CDR-1 and a CDR-2 comprising a CDR-1 and a CDR-2, respectively, contained within the Vβ or Vδ region sequence of SEQ ID NO:259;
[0382] (s) the Vα or Vγ region comprises a CDR-1 and a CDR-2 comprising a CDR-1 and a CDR-2, respectively, contained within the Vα or Vγ region sequence of SEQ ID NO:269, and the Vβ or Vδ region comprises a CDR-1 and a CDR-2 comprising a CDR-1 and a CDR-2, respectively, contained within the Vβ or Vδ region sequence of SEQ ID NO:159; or
[0383] (t) the Vα or Vγ region comprises a CDR-1 and a CDR-2 comprising a CDR-1 and a CDR-2, respectively, contained within the Vα or Vγ region sequence of SEQ ID NO:279, and the Vβ or Vδ region comprises a CDR-1 and a CDR-2 comprising a CDR-1 and a CDR-2, respectively, contained within the Vβ or Vδ region sequence of SEQ ID NO:285.
[0384] 6. A T cell receptor (TCR) or antigen-binding fragment thereof, comprising:
[0385] an alpha chain comprising a variable alpha (Vα) region and a beta chain comprising a variable beta (Vβ) region; or
[0386] a gamma chain comprising a variable gamma (Vγ) region and a delta chain comprising a variable delta (Vδ) region; wherein:
[0387] (a) the Vα or Vγ region comprises a complementarity determining region 1 (CDR-1), a complementarity determining region 2 (CDR-2), and a complementarity determining region 3 (CDR-3) comprising a CDR-1, a CDR-2, and a CDR-3, respectively, contained within the Vα or Vγ region sequence of SEQ ID NO:4, and the Vβ or Vδ region comprises a CDR-1, a CDR-2, and a CDR-3 comprising a CDR-1, a CDR-2, and a CDR-3, respectively, contained within the Vβ or Vδ region sequence of SEQ ID NO:12;
[0388] (b) the Vα or Vγ region comprises a CDR-1, a CDR-2, and a CDR-3 comprising a CDR-1, a CDR-2, and a CDR-3, respectively, contained within the Vα or Vγ region sequence of SEQ ID NO:22, and the Vβ or Vδ region comprises a CDR-1, a CDR-2, and a CDR-3 comprising a CDR-1, a CDR-2, and a CDR-3, respectively, contained within the Vβ or Vδ region sequence of SEQ ID NO:28;
[0389] (c) the Vα or Vγ region comprises a CDR-1, a CDR-2, and a CDR-3 comprising a CDR-1, a CDR-2, and a CDR-3, respectively, contained within the Vα or Vγ region sequence of SEQ ID NO:38, and the Vβ or Vδ region comprises a CDR-1, a CDR-2, and a CDR-3 comprising a CDR-1, a CDR-2, and a CDR-3, respectively, contained within the Vβ or Vδ region sequence of SEQ ID NO:44;
[0390] (d) the Vα or Vγ region comprises a CDR-1, a CDR-2, and a CDR-3 comprising a CDR-1, a CDR-2, and a CDR-3, respectively, contained within the Vα or Vγ region sequence of SEQ ID NO:52, and the Vβ or Vδ region comprises a CDR-1, a CDR-2, and a CDR-3 comprising a CDR-1, a CDR-2, and a CDR-3, respectively, contained within the Vβ or Vδ region sequence of SEQ ID NO:58;
[0391] (e) the Vα or Vγ region comprises a CDR-1, a CDR-2, and a CDR-3 comprising a CDR-1, a CDR-2, and a CDR-3, respectively, contained within the Vα or Vγ region sequence of SEQ ID NO:66, and the Vβ or Vδ region comprises a CDR-1, a CDR-2, and a CDR-3 comprising a CDR-1, a CDR-2, and a CDR-3, respectively, contained within the Vβ or Vδ region sequence of SEQ ID NO:58;
[0392] (f) the Vα or Vγ region comprises a CDR-1, a CDR-2, and a CDR-3 comprising a CDR-1, a CDR-2, and a CDR-3, respectively, contained within the Vα or Vγ region sequence of SEQ ID NO:79, and the Vβ or Vδ region comprises a CDR-1, a CDR-2, and a CDR-3 comprising a CDR-1, a CDR-2, and a CDR-3, respectively, contained within the Vβ or Vδ region sequence of SEQ ID NO:85;
[0393] (g) the Vα or Vγ region comprises a CDR-1, a CDR-2, and a CDR-3 comprising a CDR-1, a CDR-2, and a CDR-3, respectively, contained within the Vα or Vγ region sequence of SEQ ID NO:93, and the Vβ or Vδ region comprises a CDR-1, a CDR-2, and a CDR-3 comprising a CDR-1, a CDR-2, and a CDR-3, respectively, contained within the Vβ or Vδ region sequence of SEQ ID NO:99;
[0394] (h) the Vα or Vγ region comprises a CDR-1, a CDR-2, and a CDR-3 comprising a CDR-1, a CDR-2, and a CDR-3, respectively, contained within the Vα or Vγ region sequence of SEQ ID NO:107, and the Vβ or Vo region comprises a CDR-1, a CDR-2, and a CDR-3 comprising a CDR-1, a CDR-2, and a CDR-3, respectively, contained within the Vβ or Vδ region sequence of SEQ ID NO:113;
[0395] (i) the Vα or Vγ region comprises a CDR-1, a CDR-2, and a CDR-3 comprising a CDR-1, a CDR-2, and a CDR-3, respectively, contained within the Vα or Vγ region sequence of SEQ ID NO:121, and the Vβ or Vδ region comprises a CDR-1, a CDR-2, and a CDR-3 comprising a CDR-1, a CDR-2, and a CDR-3, respectively, contained within the Vβ or Vδ region sequence of SEQ ID NO:127;
[0396] (j) the Vα or Vγ region comprises a CDR-1, a CDR-2, and a CDR-3 comprising a CDR-1, a CDR-2, and a CDR-3, respectively, contained within the Vα or Vγ region sequence of SEQ ID NO:137, and the Vβ or Vδ region comprises a CDR-1, a CDR-2, and a CDR-3 comprising a CDR-1, a CDR-2, and a CDR-3, respectively, contained within the Vβ or Vδ region sequence of SEQ ID NO:143;
[0397] (k) the Vα or Vγ region comprises a CDR-1, a CDR-2, and a CDR-3 comprising a CDR-1, a CDR-2, and a CDR-3, respectively, contained within the Vα or Vγ region sequence of SEQ ID NO:153, and the Vβ or Vδ region comprises a CDR-1, a CDR-2, and a CDR-3 comprising a CDR-1, a CDR-2, and a CDR-3, respectively, contained within the Vβ or Vδ region sequence of SEQ ID NO:159;
[0398] (l) the Vα or Vγ region comprises a CDR-1, a CDR-2, and a CDR-3 comprising a CDR-1, a CDR-2, and a CDR-3, respectively, contained within the Vα or Vγ region sequence of SEQ ID NO:167, and the Vβ or Vδ region comprises a CDR-1, a CDR-2, and a CDR-3 comprising a CDR-1, a CDR-2, and a CDR-3, respectively, contained within the Vβ or Vδ region sequence of SEQ ID NO:173;
[0399] (m) the Vα or Vγ region comprises a CDR-1, a CDR-2, and a CDR-3 comprising a CDR-1, a CDR-2, and a CDR-3, respectively, contained within the Vα or Vγ region sequence of SEQ ID NO:181, and the Vβ or Vo region comprises a CDR-1, a CDR-2, and a CDR-3 comprising a CDR-1, a CDR-2, and a CDR-3, respectively, contained within the Vβ or Vδ region sequence of SEQ ID NO:187;
[0400] (n) the Vα or Vγ region comprises a CDR-1, a CDR-2, and a CDR-3 comprising a CDR-1, a CDR-2, and a CDR-3, respectively, contained within the Vα or Vγ region sequence of SEQ ID NO: 195, and the Vβ or Vδ region comprises a CDR-1, a CDR-2, and a CDR-3 comprising a CDR-1, a CDR-2, and a CDR-3, respectively, contained within the Vβ or Vδ region sequence of SEQ ID NO:201;
[0401] (o) the Vα or Vγ region comprises a CDR-1, a CDR-2, and a CDR-3 comprising a CDR-1, a CDR-2, and a CDR-3, respectively, contained within the Vα or Vγ region sequence of SEQ ID NO:209, and the Vβ or Vδ region comprises a CDR-1, a CDR-2, and a CDR-3 comprising a CDR-1, a CDR-2, and a CDR-3, respectively, contained within the Vβ or Vδ region sequence of SEQ ID NO:215;
[0402] (p) the Vα or Vγ region comprises a CDR-1, a CDR-2, and a CDR-3 comprising a CDR-1, a CDR-2, and a CDR-3, respectively, contained within the Vα or Vγ region sequence of SEQ ID NO:225, and the Vβ or Vδ region comprises a CDR-1, a CDR-2, and a CDR-3 comprising a CDR-1, a CDR-2, and a CDR-3, respectively, contained within the Vβ or Vδ region sequence of SEQ ID NO:231;
[0403] (q) the Vα or Vγ region comprises a CDR-1, a CDR-2, and a CDR-3 comprising a CDR-1, a CDR-2, and a CDR-3, respectively, contained within the Vα or Vγ region sequence of SEQ ID NO:239, and the Vβ or Vo region comprises a CDR-1, a CDR-2, and a CDR-3 comprising a CDR-1, a CDR-2, and a CDR-3, respectively, contained within the Vβ or Vδ region sequence of SEQ ID NO:245;
[0404] (r) the Vα or Vγ region comprises a CDR-1, a CDR-2, and a CDR-3 comprising a CDR-1, a CDR-2, and a CDR-3, respectively, contained within the Vα or Vγ region sequence of SEQ ID NO:253, and the Vβ or Vδ region comprises a CDR-1, a CDR-2, and a CDR-3 comprising a CDR-1, a CDR-2, and a CDR-3, respectively, contained within the Vβ or Vδ region sequence of SEQ ID NO:259;
[0405] (s) the Vα or Vγ region comprises a CDR-1, a CDR-2, and a CDR-3 comprising a CDR-1, a CDR-2, and a CDR-3, respectively, contained within the Vα or Vγ region sequence of SEQ ID NO:269, and the Vβ or Vo region comprises a CDR-1, a CDR-2, and a CDR-3 comprising a CDR-1, a CDR-2, and a CDR-3, respectively, contained within the Vβ or Vδ region sequence of SEQ ID NO:159; or
[0406] (t) the Vα or Vγ region comprises a CDR-1, a CDR-2, and a CDR-3 comprising a CDR-1, a CDR-2, and a CDR-3, respectively, contained within the Vα or Vγ region sequence of SEQ ID NO:279, and the Vβ or Vδ region comprises a CDR-1, a CDR-2, and a CDR-3 comprising a CDR-1, a CDR-2, and a CDR-3, respectively, contained within the Vβ or Vδ region sequence of SEQ ID NO:285.
[0407] 7. A T cell receptor (TCR) or antigen-binding fragment thereof, comprising:
[0408] an alpha chain comprising a variable alpha (Vα) region and a beta chain comprising a variable beta (Vβ) region; or a gamma chain comprising a variable gamma (Vγ) region and a delta chain comprising a variable delta (Vδ) region; wherein:
[0409] (a) the Vα or Vγ region comprises SEQ ID NO:4 or a sequence that has at least 90% sequence identity thereto, and the Vβ or Vδ region comprises SEQ ID NO:12 or a sequence that has at least 90% sequence identity thereto;
[0410] (b) the Vα or Vγ region comprises SEQ ID NO:22 or a sequence that has at least 90% sequence identity thereto, and the Vβ or Vδ region comprises SEQ ID NO:28 or a sequence that has at least 90% sequence identity thereto;
[0411] (c) the Vα or Vγ region comprises SEQ ID NO:38 or a sequence that has at least 90% sequence identity thereto, and the Vβ or Vδ region comprises SEQ ID NO:44 or a sequence that has at least 90% sequence identity thereto;
[0412] (d) the Vα or Vγ region comprises SEQ ID NO:52 or a sequence that has at least 90% sequence identity thereto, and the Vβ or Vδ region comprises SEQ ID NO:58 or a sequence that has at least 90% sequence identity thereto;
[0413] (e) the Vα or Vγ region comprises SEQ ID NO:66 or a sequence that has at least 90% sequence identity thereto, and the Vβ or Vδ region comprises SEQ ID NO:58 or a sequence that has at least 90% sequence identity thereto;
[0414] (f) the Vα or Vγ region comprises SEQ ID NO:79 or a sequence that has at least 90% sequence identity thereto, and the Vβ or Vo region comprises SEQ ID NO:85 or a sequence that has at least 90% sequence identity thereto;
[0415] (g) the Vα or Vγ region comprises SEQ ID NO:93 or a sequence that has at least 90% sequence identity thereto, and the Vβ or Vo region comprises SEQ ID NO:99 or a sequence that has at least 90% sequence identity thereto;
[0416] (h) the Vα or Vγ region comprises SEQ ID NO:107 or a sequence that has at least 90% sequence identity thereto, and the Vβ or Vo region comprises SEQ ID NO:113 or a sequence that has at least 90% sequence identity thereto;
[0417] (i) the Vα or Vγ region comprises SEQ ID NO:121 or a sequence that has at least 90% sequence identity thereto, and the Vβ or Vo region comprises SEQ ID NO:127 or a sequence that has at least 90% sequence identity thereto;
[0418] (j) the Vα or Vγ region comprises SEQ ID NO:137 or a sequence that has at least 90% sequence identity thereto, and the Vβ or Vo region comprises SEQ ID NO: 143 or a sequence that has at least 90% sequence identity thereto;
[0419] (k) the Vα or Vγ region comprises SEQ ID NO:153 or a sequence that has at least 90% sequence identity thereto, and the Vβ or Vo region comprises SEQ ID NO:159 or a sequence that has at least 90% sequence identity thereto;
[0420] (l) the Vα or Vγ region comprises SEQ ID NO:167 or a sequence that has at least 90% sequence identity thereto, and the Vβ or Vo region comprises SEQ ID NO: 173 or a sequence that has at least 90% sequence identity thereto;
[0421] (m) the Vα or Vγ region comprises SEQ ID NO:181 or a sequence that has at least 90% sequence identity thereto, and the Vβ or Vo region comprises SEQ ID NO:187 or a sequence that has at least 90% sequence identity thereto;
[0422] (n) the Vα or Vγ region comprises SEQ ID NO: 195 or a sequence that has at least 90% sequence identity thereto, and the Vβ or Vδ region comprises SEQ ID NO:201 or a sequence that has at least 90% sequence identity thereto;
[0423] (o) the Vα or Vγ region comprises SEQ ID NO:209 or a sequence that has at least 90% sequence identity thereto, and the Vβ or Vo region comprises SEQ ID NO:215 or a sequence that has at least 90% sequence identity thereto;
[0424] (p) the Vα or Vγ region comprises SEQ ID NO:225 or a sequence that has at least 90% sequence identity thereto, and the Vβ or Vo region comprises SEQ ID NO:231 or a sequence that has at least 90% sequence identity thereto;
[0425] (q) the Vα or Vγ region comprises SEQ ID NO:239 or a sequence that has at least 90% sequence identity thereto, and the Vβ or Vo region comprises SEQ ID NO:245 or a sequence that has at least 90% sequence identity thereto;
[0426] (r) the Vα or Vγ region comprises SEQ ID NO:253 or a sequence that has at least 90% sequence identity thereto, and the Vβ or Vo region comprises SEQ ID NO:259 or a sequence that has at least 90% sequence identity thereto;
[0427] (s) the Vα or Vγ region comprises SEQ ID NO:269 or a sequence that has at least 90% sequence identity thereto, and the Vβ or Vo region comprises SEQ ID NO:159 or a sequence that has at least 90% sequence identity thereto; or
[0428] (t) the Vα or Vγ region comprises SEQ ID NO:279 or a sequence that has at least 90% sequence identity thereto, and the Vβ or Vo region comprises SEQ ID NO:285 or a sequence that has at least 90% sequence identity thereto.
[0429] 8. The TCR or antigen-binding fragment thereof of any of embodiments 1-7, wherein:
[0430] (a) the Vα or Vγ region comprises SEQ ID NO:4, and the Vβ or Vδ region comprises SEQ ID NO:12;
[0431] (b) the Vα or Vγ region comprises SEQ ID NO:22, and the Vβ or Vδ region comprises SEQ ID NO:28;
[0432] (c) the Vα or Vγ region comprises SEQ ID NO:38, and the Vβ or Vδ region comprises SEQ ID NO:44;
[0433] (d) the Vα or Vγ region comprises SEQ ID NO:52, and the Vβ or Vδ region comprises SEQ ID NO:58;
[0434] (e) the Vα or Vγ region comprises SEQ ID NO:66, and the Vβ or Vδ region comprises SEQ ID NO:58;
[0435] (f) the Vα or Vγ region comprises SEQ ID NO:79, and the Vβ or Vδ region comprises SEQ ID NO:85;
[0436] (g) the Vα or Vγ region comprises SEQ ID NO:93, and the Vβ or Vδ region comprises SEQ ID NO:99;
[0437] (h) the Vα or Vγ region comprises SEQ ID NO:107, and the Vβ or Vδ region comprises SEQ ID NO:113;
[0438] (i) the Vα or Vγ region comprises SEQ ID NO:121, and the Vβ or Vδ region comprises SEQ ID NO:127;
[0439] (j) the Vα or Vγ region comprises SEQ ID NO:137, and the Vβ or Vδ region comprises SEQ ID NO:143;
[0440] (k) the Vα or Vγ region comprises SEQ ID NO:153, and the Vβ or Vδ region comprises SEQ ID NO:159;
[0441] (l) the Vα or Vγ region comprises SEQ ID NO:167, and the Vβ or Vδ region comprises SEQ ID NO:173;
[0442] (m) the Vα or Vγ region comprises SEQ ID NO:181, and the Vβ or Vδ region comprises SEQ ID NO:187;
[0443] (n) the Vα or Vγ region comprises SEQ ID NO:195, and the Vβ or Vδ region comprises SEQ ID NO:201;
[0444] (o) the Vα or Vγ region comprises SEQ ID NO:209, and the Vβ or Vδ region comprises SEQ ID NO:215;
[0445] (p) the Vα or Vγ region comprises SEQ ID NO:225, and the Vβ or Vδ region comprises SEQ ID NO:231;
[0446] (q) the Vα or Vγ region comprises SEQ ID NO:239, and the Vβ or Vδ region comprises SEQ ID NO:245;
[0447] (r) the Vα or Vγ region comprises SEQ ID NO:253, and the Vβ or Vδ region comprises SEQ ID NO:259;
[0448] (s) the Vα or Vγ region comprises SEQ ID NO:269, and the Vβ or Vδ region comprises SEQ ID NO:159; or
[0449] (t) the Vα or Vγ region comprises SEQ ID NO:279, and the Vβ or Vδ region comprises SEQ ID NO:285.
[0450] 9. The TCR or antigen-binding fragment thereof of any of embodiments 1-8, wherein:
[0451] the alpha chain further comprises an alpha constant (Cα) region and the beta chain further comprises a beta constant (Cβ) region; or
[0452] the gamma chain further comprises an gamma constant (Cγ) region and the delta chain further comprises a delta constant (Cδ) region.
[0453] 10. The TCR or antigen-binding fragment thereof of embodiment 9, wherein:
[0454] the Cα comprises SEQ ID NO: 294 or 296 and the Cβ comprises SEQ ID NO: 297 or 299.
[0455] 11. The TCR or antigen-binding fragment thereof of any of embodiments 1-10, wherein:
[0456] (a) the alpha or gamma chain comprises SEQ ID NO:6, and the beta or delta chain comprises SEQ ID NO:14;
[0457] (b) the alpha or gamma chain comprises SEQ ID NO:24, and the beta or delta chain comprises SEQ ID NO:30;
[0458] (c) the alpha or gamma chain comprises SEQ ID NO:40, and the beta or delta chain comprises SEQ ID NO:46;
[0459] (d) the alpha or gamma chain comprises SEQ ID NO:54, and the beta or delta chain comprises SEQ ID NO:60;
[0460] (e) the alpha or gamma chain comprises SEQ ID NO:68, and the beta or delta chain comprises SEQ ID NO:71;
[0461] (f) the alpha or gamma chain comprises SEQ ID NO:81, and the beta or delta chain comprises SEQ ID NO:87;
[0462] (g) the alpha or gamma chain comprises SEQ ID NO:95, and the beta or delta chain comprises SEQ ID NO:101;
[0463] (h) the alpha or gamma chain comprises SEQ ID NO:109, and the beta or delta chain comprises SEQ ID NO:115;
[0464] (i) the alpha or gamma chain comprises SEQ ID NO:123, and the beta or delta chain comprises SEQ ID NO:129;
[0465] (j) the alpha or gamma chain comprises SEQ ID NO:139, and the beta or delta chain comprises SEQ ID NO:145;
[0466] (k) the alpha or gamma chain comprises SEQ ID NO:155, and the beta or delta chain comprises SEQ ID NO:161;
[0467] (l) the alpha or gamma chain comprises SEQ ID NO:169, and the beta or delta chain comprises SEQ ID NO:175;
[0468] (m) the alpha or gamma chain comprises SEQ ID NO:183, and the beta or delta chain comprises SEQ ID NO:189;
[0469] (n) the alpha or gamma chain comprises SEQ ID NO:197, and the beta or delta chain comprises SEQ ID NO:203;
[0470] (o) the alpha or gamma chain comprises SEQ ID NO:211, and the beta or delta chain comprises SEQ ID NO:217;
[0471] (p) the alpha or gamma chain comprises SEQ ID NO:227, and the beta or delta chain comprises SEQ ID NO:233;
[0472] (q) the alpha or gamma chain comprises SEQ ID NO:241, and the beta or delta chain comprises SEQ ID NO:247;
[0473] (r) the alpha or gamma chain comprises SEQ ID NO:255, and the beta or delta chain comprises SEQ ID NO:261;
[0474] (s) the alpha or gamma chain comprises SEQ ID NO:271, and the beta or delta chain comprises SEQ ID NO:161;
[0475] (t) the alpha or gamma chain comprises SEQ ID NO:281, and the beta or delta chain comprises SEQ ID NO:287;
[0476] (u) the alpha or gamma chain comprises SEQ ID NO:362, and the beta or delta chain comprises SEQ ID NO:366;
[0477] (v) the alpha or gamma chain comprises SEQ ID NO:372, and the beta or delta chain comprises SEQ ID NO:376;
[0478] (w) the alpha or gamma chain comprises SEQ ID NO:382, and the beta or delta chain comprises SEQ ID NO:386;
[0479] (x) the alpha or gamma chain comprises SEQ ID NO:392, and the beta or delta chain comprises SEQ ID NO:396;
[0480] (y) the alpha or gamma chain comprises SEQ ID NO:402, and the beta or delta chain comprises SEQ ID NO:406;
[0481] (z) the alpha or gamma chain comprises SEQ ID NO:412, and the beta or delta chain comprises SEQ ID NO:416;
[0482] (aa) the alpha or gamma chain comprises SEQ ID NO:422, and the beta or delta chain comprises SEQ ID NO:426;
[0483] (ab) the alpha or gamma chain comprises SEQ ID NO:432, and the beta or delta chain comprises SEQ ID NO:436;
[0484] (ac) the alpha or gamma chain comprises SEQ ID NO:442, and the beta or delta chain comprises SEQ ID NO:446;
[0485] (ad) the alpha or gamma chain comprises SEQ ID NO:452, and the beta or delta chain comprises SEQ ID NO:456; or (ae) the alpha or gamma chain comprises SEQ ID NO:483, and the beta or delta chain comprises SEQ ID NO:487.
[0486] 12. The TCR or antigen-binding fragment thereof of any of embodiments 1-11, wherein the TCR or antigen-binding fragment thereof recognizes a peptide epitope of a minor histocompatibility antigen HA-1 in the context of an MHC molecule.
[0487] 13. The TCR or antigen-binding fragment thereof of embodiment 12, wherein the MHC molecule is a human leukocyte antigens (HLA)-A molecule.
[0488] 14. The TCR or antigen-binding fragment thereof of embodiment 13, wherein the HLA-A molecule is of serotype HLA-A*02:01.
[0489] 15. The TCR or antigen-binding fragment thereof of embodiment 13, wherein the HLA-A molecule is of serotype HLA-A*02:06.
[0490] 16. The TCR or antigen-binding fragment thereof of any of embodiments 12-15, wherein the peptide epitope of HA-1 is set forth in SEQ ID NO:354.
[0491] 17. A polynucleotide encoding the TCR or antigen-binding fragment thereof of any of embodiments 1-16, or an alpha chain, a beta chain, a gamma chain, or a delta chain thereof.
[0492] 18. The polynucleotide of embodiment 17, wherein the polynucleotide comprises a nucleotide sequence encoding the Vα region and a nucleotide sequence encoding the Vβ region; or a nucleotide sequence encoding the Vγ region and a nucleotide sequence encoding the Vδ region; wherein:
[0493] (a) the nucleotide sequence encoding the Vα or Vγ region comprises SEQ ID NO:7 or a sequence that has at least 90% sequence identity thereto, and the nucleotide sequence encoding the Vβ or Vδ region comprises SEQ ID NO:15 or a sequence that has at least 90% sequence identity thereto;
[0494] (b) the nucleotide sequence encoding the Vα or Vγ region comprises SEQ ID NO:25 or a sequence that has at least 90% sequence identity thereto, and the nucleotide sequence encoding the Vβ or Vδ region comprises SEQ ID NO:31 or a sequence that has at least 90% sequence identity thereto;
[0495] (c) the nucleotide sequence encoding the Vα or Vγ region comprises SEQ ID NO:41 or a sequence that has at least 90% sequence identity thereto, and the nucleotide sequence encoding the Vβ or Vδ region comprises SEQ ID NO:47 or a sequence that has at least 90% sequence identity thereto;
[0496] (d) the nucleotide sequence encoding the Vα or Vγ region comprises SEQ ID NO:55 or a sequence that has at least 90% sequence identity thereto, and the nucleotide sequence encoding the Vβ or Vδ region comprises SEQ ID NO:61 or a sequence that has at least 90% sequence identity thereto;
[0497] (e) the nucleotide sequence encoding the Vα or Vγ region comprises SEQ ID NO:69 or a sequence that has at least 90% sequence identity thereto, and the nucleotide sequence encoding the Vβ or Vδ region comprises SEQ ID NO:72 or a sequence that has at least 90% sequence identity thereto;
[0498] (f) the nucleotide sequence encoding the Vα or Vγ region comprises SEQ ID NO:82 or a sequence that has at least 90% sequence identity thereto, and the nucleotide sequence encoding the Vβ or Vδ region comprises SEQ ID NO:88 or a sequence that has at least 90% sequence identity thereto;
[0499] (g) the nucleotide sequence encoding the Vα or Vγ region comprises SEQ ID NO:96 or a sequence that has at least 90% sequence identity thereto, and the nucleotide sequence encoding the Vβ or Vδ region comprises SEQ ID NO:102 or a sequence that has at least 90% sequence identity thereto;
[0500] (h) the nucleotide sequence encoding the Vα or Vγ region comprises SEQ ID NO:110 or a sequence that has at least 90% sequence identity thereto, and the nucleotide sequence encoding the Vβ or Vδ region comprises SEQ ID NO:116 or a sequence that has at least 90% sequence identity thereto;
[0501] (i) the nucleotide sequence encoding the Vα or Vγ region comprises SEQ ID NO:124 or a sequence that has at least 90% sequence identity thereto, and the nucleotide sequence encoding the Vβ or Vδ region comprises SEQ ID NO:130 or a sequence that has at least 90% sequence identity thereto;
[0502] (j) the nucleotide sequence encoding the Vα or Vγ region comprises SEQ ID NO:140 or a sequence that has at least 90% sequence identity thereto, and the nucleotide sequence encoding the Vβ or Vδ region comprises SEQ ID NO:146 or a sequence that has at least 90% sequence identity thereto;
[0503] (k) the nucleotide sequence encoding the Vα or Vγ region comprises SEQ ID NO:156 or a sequence that has at least 90% sequence identity thereto, and the nucleotide sequence encoding the Vβ or Vδ region comprises SEQ ID NO:162 or a sequence that has at least 90% sequence identity thereto;
[0504] (l) the nucleotide sequence encoding the Vα or Vγ region comprises SEQ ID NO:170 or a sequence that has at least 90% sequence identity thereto, and the nucleotide sequence encoding the Vβ or Vδ region comprises SEQ ID NO:176 or a sequence that has at least 90% sequence identity thereto;
[0505] (m) the nucleotide sequence encoding the Vα or Vγ region comprises SEQ ID NO:184 or a sequence that has at least 90% sequence identity thereto, and the nucleotide sequence encoding the Vβ or Vδ region comprises SEQ ID NO:190 or a sequence that has at least 90% sequence identity thereto;
[0506] (n) the nucleotide sequence encoding the Vα or Vγ region comprises SEQ ID NO:198 or a sequence that has at least 90% sequence identity thereto, and the nucleotide sequence encoding the Vβ or Vδ region comprises SEQ ID NO:204 or a sequence that has at least 90% sequence identity thereto;
[0507] (o) the nucleotide sequence encoding the Vα or Vγ region comprises SEQ ID NO:212 or a sequence that has at least 90% sequence identity thereto, and the nucleotide sequence encoding the Vβ or Vδ region comprises SEQ ID NO:218 or a sequence that has at least 90% sequence identity thereto;
[0508] (p) the nucleotide sequence encoding the Vα or Vγ region comprises SEQ ID NO:228 or a sequence that has at least 90% sequence identity thereto, and the nucleotide sequence encoding the Vβ or Vδ region comprises SEQ ID NO:234 or a sequence that has at least 90% sequence identity thereto;
[0509] (q) the nucleotide sequence encoding the Vα or Vγ region comprises SEQ ID NO:242 or a sequence that has at least 90% sequence identity thereto, and the nucleotide sequence encoding the Vβ or Vδ region comprises SEQ ID NO:248 or a sequence that has at least 90% sequence identity thereto;
[0510] (r) the nucleotide sequence encoding the Vα or Vγ region comprises SEQ ID NO:256 or a sequence that has at least 90% sequence identity thereto, and the nucleotide sequence encoding the Vβ or Vδ region comprises SEQ ID NO:262 or a sequence that has at least 90% sequence identity thereto;
[0511] (s) the nucleotide sequence encoding the Vα or Vγ region comprises SEQ ID NO:272 or a sequence that has at least 90% sequence identity thereto, and the nucleotide sequence encoding the Vβ or Vδ region comprises SEQ ID NO:274 or a sequence that has at least 90% sequence identity thereto; or
[0512] (t) the nucleotide sequence encoding the Vα or Vγ region comprises SEQ ID NO:282 or a sequence that has at least 90% sequence identity thereto, and the nucleotide sequence encoding the Vβ or Vδ region comprises SEQ ID NO:288 or a sequence that has at least 90% sequence identity thereto.
[0513] 19. The polynucleotide of embodiment 17 or 18, wherein:
[0514] (a) the nucleotide sequence encoding the alpha or gamma chain comprises SEQ ID NO:8, and the nucleotide sequence encoding the beta or delta chain comprises SEQ ID NO:16;
[0515] (b) the nucleotide sequence encoding the alpha or gamma chain comprises SEQ ID NO:26, and the nucleotide sequence encoding the beta or delta chain comprises SEQ ID NO:32;
[0516] (c) the nucleotide sequence encoding the alpha or gamma chain comprises SEQ ID NO:42, and the nucleotide sequence encoding the beta or delta chain comprises SEQ ID NO:48;
[0517] (d) the nucleotide sequence encoding the alpha or gamma chain comprises SEQ ID NO:56, and the nucleotide sequence encoding the beta or delta chain comprises SEQ ID NO:62;
[0518] (e) the nucleotide sequence encoding the alpha or gamma chain comprises SEQ ID NO:70, and the nucleotide sequence encoding the beta or delta chain comprises SEQ ID NO:73;
[0519] (f) the nucleotide sequence encoding the alpha or gamma chain comprises SEQ ID NO:83, and the nucleotide sequence encoding the beta or delta chain comprises SEQ ID NO:89;
[0520] (g) the nucleotide sequence encoding the alpha or gamma chain comprises SEQ ID NO:97, and the nucleotide sequence encoding the beta or delta chain comprises SEQ ID NO: 103;
[0521] (h) the nucleotide sequence encoding the alpha or gamma chain comprises SEQ ID NO:111, and the nucleotide sequence encoding the beta or delta chain comprises SEQ ID NO:117;
[0522] (i) the nucleotide sequence encoding the alpha or gamma chain comprises SEQ ID NO:125, and the nucleotide sequence encoding the beta or delta chain comprises SEQ ID NO: 131;
[0523] (j) the nucleotide sequence encoding the alpha or gamma chain comprises SEQ ID NO:141, and the nucleotide sequence encoding the beta or delta chain comprises SEQ ID NO: 147;
[0524] (k) the nucleotide sequence encoding the alpha or gamma chain comprises SEQ ID NO:157, and the nucleotide sequence encoding the beta or delta chain comprises SEQ ID NO:163;
[0525] (l) the nucleotide sequence encoding the alpha or gamma chain comprises SEQ ID NO:171, and the nucleotide sequence encoding the beta or delta chain comprises SEQ ID NO: 177;
[0526] (m) the nucleotide sequence encoding the alpha or gamma chain comprises SEQ ID NO:185, and the nucleotide sequence encoding the beta or delta chain comprises SEQ ID NO:191;
[0527] (n) the nucleotide sequence encoding the alpha or gamma chain comprises SEQ ID NO: 199, and the nucleotide sequence encoding the beta or delta chain comprises SEQ ID NO:205;
[0528] (o) the nucleotide sequence encoding the alpha or gamma chain comprises SEQ ID NO:213, and the nucleotide sequence encoding the beta or delta chain comprises SEQ ID NO:219;
[0529] (p) the nucleotide sequence encoding the alpha or gamma chain comprises SEQ ID NO:229, and the nucleotide sequence encoding the beta or delta chain comprises SEQ ID NO:235;
[0530] (q) the nucleotide sequence encoding the alpha or gamma chain comprises SEQ ID NO:243, and the nucleotide sequence encoding the beta or delta chain comprises SEQ ID NO:249;
[0531] (r) the nucleotide sequence encoding the alpha or gamma chain comprises SEQ ID NO:257, and the nucleotide sequence encoding the beta or delta chain comprises SEQ ID NO:263;
[0532] (s) the nucleotide sequence encoding the alpha or gamma chain comprises SEQ ID NO:273, and the nucleotide sequence encoding the beta or delta chain comprises SEQ ID NO:275; or
[0533] (t) the nucleotide sequence encoding the alpha or gamma chain comprises SEQ ID NO:283, and the nucleotide sequence encoding the beta or delta chain comprises SEQ ID NO:289.
[0534] 20. The polynucleotide of embodiment 17 or 18, wherein:
[0535] (a) the nucleotide sequence encoding the Vα or Vγ region comprises SEQ ID NO:301, and the nucleotide sequence encoding the Vβ or Vδ region comprises SEQ ID NO:321;
[0536] (b) the nucleotide sequence encoding the Vα or Vγ region comprises SEQ ID NO:302, and the nucleotide sequence encoding the Vβ or Vδ region comprises SEQ ID NO:322;
[0537] (c) the nucleotide sequence encoding the Vα or Vγ region comprises SEQ ID NO:303, and the nucleotide sequence encoding the Vβ or Vδ region comprises SEQ ID NO:323;
[0538] (d) the nucleotide sequence encoding the Vα or Vγ region comprises SEQ ID NO:304, and the nucleotide sequence encoding the Vβ or Vδ region comprises SEQ ID NO:324;
[0539] (e) the nucleotide sequence encoding the Vα or Vγ region comprises SEQ ID NO:305, and the nucleotide sequence encoding the Vβ or Vδ region comprises SEQ ID NO:325;
[0540] (f) the nucleotide sequence encoding the Vα or Vγ region comprises SEQ ID NO:306, and the nucleotide sequence encoding the Vβ or Vδ region comprises SEQ ID NO:326;
[0541] (g) the nucleotide sequence encoding the Vα or Vγ region comprises SEQ ID NO:307, and the nucleotide sequence encoding the Vβ or Vδ region comprises SEQ ID NO:327;
[0542] (h) the nucleotide sequence encoding the Vα or Vγ region comprises SEQ ID NO:308, and the nucleotide sequence encoding the Vβ or Vδ region comprises SEQ ID NO:328;
[0543] (i) the nucleotide sequence encoding the Vα or Vγ region comprises SEQ ID NO:309, and the nucleotide sequence encoding the Vβ or Vδ region comprises SEQ ID NO:329;
[0544] (j) the nucleotide sequence encoding the Vα or Vγ region comprises SEQ ID NO:310, and the nucleotide sequence encoding the Vβ or Vδ region comprises SEQ ID NO:330;
[0545] (k) the nucleotide sequence encoding the Vα or Vγ region comprises SEQ ID NO:311, and the nucleotide sequence encoding the Vβ or Vδ region comprises SEQ ID NO:331;
[0546] (l) the nucleotide sequence encoding the Vα or Vγ region comprises SEQ ID NO:312, and the nucleotide sequence encoding the Vβ or Vδ region comprises SEQ ID NO:332;
[0547] (m) the nucleotide sequence encoding the Vα or Vγ region comprises SEQ ID NO:313, and the nucleotide sequence encoding the Vβ or Vδ region comprises SEQ ID NO:333;
[0548] (n) the nucleotide sequence encoding the Vα or Vγ region comprises SEQ ID NO:314, and the nucleotide sequence encoding the Vβ or Vδ region comprises SEQ ID NO:334;
[0549] (o) the nucleotide sequence encoding the Vα or Vγ region comprises SEQ ID NO:315, and the nucleotide sequence encoding the Vβ or Vδ region comprises SEQ ID NO:335;
[0550] (p) the nucleotide sequence encoding the Vα or Vγ region comprises SEQ ID NO:316, and the nucleotide sequence encoding the Vβ or Vδ region comprises SEQ ID NO:336;
[0551] (q) the nucleotide sequence encoding the Vα or Vγ region comprises SEQ ID NO:317, and the nucleotide sequence encoding the Vβ or Vδ region comprises SEQ ID NO:337;
[0552] (r) the nucleotide sequence encoding the Vα or Vγ region comprises SEQ ID NO:318, and the nucleotide sequence encoding the Vβ or Vδ region comprises SEQ ID NO:338;
[0553] (s) the nucleotide sequence encoding the Vα or Vγ region comprises SEQ ID NO:319, and the nucleotide sequence encoding the Vβ or Vδ region comprises SEQ ID NO:339; or
[0554] (t) the nucleotide sequence encoding the Vα or Vγ region comprises SEQ ID NO:320, and the nucleotide sequence encoding the Vβ or Vδ region comprises SEQ ID NO:340.
[0555] 21. The polynucleotide of embodiment 17 or 18, wherein the polynucleotide comprises a nucleotide sequence encoding an alpha chain and a nucleotide sequence encoding a beta chain; or a nucleotide sequence encoding a gamma chain and a nucleotide sequence encoding a delta chain; wherein:
[0556] (a) the nucleotide sequence encoding the alpha or gamma chain comprises SEQ ID NO:8 or a sequence that has at least 90% sequence identity thereto, and the nucleotide sequence encoding the beta or delta chain comprises SEQ ID NO:16 or a sequence that has at least 90% sequence identity thereto;
[0557] (b) the nucleotide sequence encoding the alpha or gamma chain comprises SEQ ID NO:26 or a sequence that has at least 90% sequence identity thereto, and the nucleotide sequence encoding the beta or delta chain comprises SEQ ID NO:32 or a sequence that has at least 90% sequence identity thereto;
[0558] (c) the nucleotide sequence encoding the alpha or gamma chain comprises SEQ ID NO:42 or a sequence that has at least 90% sequence identity thereto, and the nucleotide sequence encoding the beta or delta chain comprises SEQ ID NO:48 or a sequence that has at least 90% sequence identity thereto;
[0559] (d) the nucleotide sequence encoding the alpha or gamma chain comprises SEQ ID NO:56 or a sequence that has at least 90% sequence identity thereto, and the nucleotide sequence encoding the beta or delta chain comprises SEQ ID NO:62 or a sequence that has at least 90% sequence identity thereto;
[0560] (e) the nucleotide sequence encoding the alpha or gamma chain comprises SEQ ID NO:70 or a sequence that has at least 90% sequence identity thereto, and the nucleotide sequence encoding the beta or delta chain comprises SEQ ID NO:73 or a sequence that has at least 90% sequence identity thereto;
[0561] (f) the nucleotide sequence encoding the alpha or gamma chain comprises SEQ ID NO:83 or a sequence that has at least 90% sequence identity thereto, and the nucleotide sequence encoding the beta or delta chain comprises SEQ ID NO:89 or a sequence that has at least 90% sequence identity thereto;
[0562] (g) the nucleotide sequence encoding the alpha or gamma chain comprises SEQ ID NO:97 or a sequence that has at least 90% sequence identity thereto, and the nucleotide sequence encoding the beta or delta chain comprises SEQ ID NO:103 or a sequence that has at least 90% sequence identity thereto;
[0563] (h) the nucleotide sequence encoding the alpha or gamma chain comprises SEQ ID NO:111 or a sequence that has at least 90% sequence identity thereto, and the nucleotide sequence encoding the beta or delta chain comprises SEQ ID NO:117 or a sequence that has at least 90% sequence identity thereto;
[0564] (i) the nucleotide sequence encoding the alpha or gamma chain comprises SEQ ID NO:125 or a sequence that has at least 90% sequence identity thereto, and the nucleotide sequence encoding the beta or delta chain comprises SEQ ID NO:131 or a sequence that has at least 90% sequence identity thereto;
[0565] (j) the nucleotide sequence encoding the alpha or gamma chain comprises SEQ ID NO:141 or a sequence that has at least 90% sequence identity thereto, and the nucleotide sequence encoding the beta or delta chain comprises SEQ ID NO:147 or a sequence that has at least 90% sequence identity thereto;
[0566] (k) the nucleotide sequence encoding the alpha or gamma chain comprises SEQ ID NO:157 or a sequence that has at least 90% sequence identity thereto, and the nucleotide sequence encoding the beta or delta chain comprises SEQ ID NO:163 or a sequence that has at least 90% sequence identity thereto;
[0567] (l) the nucleotide sequence encoding the alpha or gamma chain comprises SEQ ID NO:171 or a sequence that has at least 90% sequence identity thereto, and the nucleotide sequence encoding the beta or delta chain comprises SEQ ID NO:177 or a sequence that has at least 90% sequence identity thereto;
[0568] (m) the nucleotide sequence encoding the alpha or gamma chain comprises SEQ ID NO:185 or a sequence that has at least 90% sequence identity thereto, and the nucleotide sequence encoding the beta or delta chain comprises SEQ ID NO:191 or a sequence that has at least 90% sequence identity thereto;
[0569] (n) the nucleotide sequence encoding the alpha or gamma chain comprises SEQ ID NO:199 or a sequence that has at least 90% sequence identity thereto, and the nucleotide sequence encoding the beta or delta chain comprises SEQ ID NO:205 or a sequence that has at least 90% sequence identity thereto;
[0570] (o) the nucleotide sequence encoding the alpha or gamma chain comprises SEQ ID NO:213 or a sequence that has at least 90% sequence identity thereto, and the nucleotide sequence encoding the beta or delta chain comprises SEQ ID NO:219 or a sequence that has at least 90% sequence identity thereto;
[0571] (p) the nucleotide sequence encoding the alpha or gamma chain comprises SEQ ID NO:229 or a sequence that has at least 90% sequence identity thereto, and the nucleotide sequence encoding the beta or delta chain comprises SEQ ID NO:235 or a sequence that has at least 90% sequence identity thereto;
[0572] (q) the nucleotide sequence encoding the alpha or gamma chain comprises SEQ ID NO:243 or a sequence that has at least 90% sequence identity thereto, and the nucleotide sequence encoding the beta or delta chain comprises SEQ ID NO:249 or a sequence that has at least 90% sequence identity thereto;
[0573] (r) the nucleotide sequence encoding the alpha or gamma chain comprises SEQ ID NO:257 or a sequence that has at least 90% sequence identity thereto, and the nucleotide sequence encoding the beta or delta chain comprises SEQ ID NO:263 or a sequence that has at least 90% sequence identity thereto;
[0574] (s) the nucleotide sequence encoding the alpha or gamma chain comprises SEQ ID NO:273 or a sequence that has at least 90% sequence identity thereto, and the nucleotide sequence encoding the beta or delta chain comprises SEQ ID NO:275 or a sequence that has at least 90% sequence identity thereto; or
[0575] (t) the nucleotide sequence encoding the alpha or gamma chain comprises SEQ ID NO:283 or a sequence that has at least 90% sequence identity thereto, and the nucleotide sequence encoding the beta or delta chain comprises SEQ ID NO:289 or a sequence that has at least 90% sequence identity thereto.
[0576] 22. The polynucleotide of embodiment 21, wherein:
[0577] (a) the nucleotide sequence encoding the alpha or gamma chain comprises SEQ ID NO:8, and the nucleotide sequence encoding the beta or delta chain comprises SEQ ID NO: 16;
[0578] (b) the nucleotide sequence encoding the alpha or gamma chain comprises SEQ ID NO:26, and the nucleotide sequence encoding the beta or delta chain comprises SEQ ID NO:32;
[0579] (c) the nucleotide sequence encoding the alpha or gamma chain comprises SEQ ID NO:42, and the nucleotide sequence encoding the beta or delta chain comprises SEQ ID NO:48;
[0580] (d) the nucleotide sequence encoding the alpha or gamma chain comprises SEQ ID NO:56, and the nucleotide sequence encoding the beta or delta chain comprises SEQ ID NO:62;
[0581] (e) the nucleotide sequence encoding the alpha or gamma chain comprises SEQ ID NO:70, and the nucleotide sequence encoding the beta or delta chain comprises SEQ ID NO:73;
[0582] (f) the nucleotide sequence encoding the alpha or gamma chain comprises SEQ ID NO:83, and the nucleotide sequence encoding the beta or delta chain comprises SEQ ID NO:89;
[0583] (g) the nucleotide sequence encoding the alpha or gamma chain comprises SEQ ID NO:97, and the nucleotide sequence encoding the beta or delta chain comprises SEQ ID NO: 103;
[0584] (h) the nucleotide sequence encoding the alpha or gamma chain comprises SEQ ID NO:111, and the nucleotide sequence encoding the beta or delta chain comprises SEQ ID NO:117;
[0585] (i) the nucleotide sequence encoding the alpha or gamma chain comprises SEQ ID NO:125, and the nucleotide sequence encoding the beta or delta chain comprises SEQ ID NO: 131;
[0586] (j) the nucleotide sequence encoding the alpha or gamma chain comprises SEQ ID NO:141, and the nucleotide sequence encoding the beta or delta chain comprises SEQ ID NO: 147;
[0587] (k) the nucleotide sequence encoding the alpha or gamma chain comprises SEQ ID NO:157, and the nucleotide sequence encoding the beta or delta chain comprises SEQ ID NO:163;
[0588] (l) the nucleotide sequence encoding the alpha or gamma chain comprises SEQ ID NO:171, and the nucleotide sequence encoding the beta or delta chain comprises SEQ ID NO:177;
[0589] (m) the nucleotide sequence encoding the alpha or gamma chain comprises SEQ ID NO:185, and the nucleotide sequence encoding the beta or delta chain comprises SEQ ID NO:191;
[0590] (n) the nucleotide sequence encoding the alpha or gamma chain comprises SEQ ID NO: 199, and the nucleotide sequence encoding the beta or delta chain comprises SEQ ID NO:205;
[0591] (o) the nucleotide sequence encoding the alpha or gamma chain comprises SEQ ID NO:213, and the nucleotide sequence encoding the beta or delta chain comprises SEQ ID NO:219;
[0592] (p) the nucleotide sequence encoding the alpha or gamma chain comprises SEQ ID NO: 229, and the nucleotide sequence encoding the beta or delta chain comprises SEQ ID NO:235;
[0593] (q) the nucleotide sequence encoding the alpha or gamma chain comprises SEQ ID NO:243, and the nucleotide sequence encoding the beta or delta chain comprises SEQ ID NO:249;
[0594] (r) the nucleotide sequence encoding the alpha or gamma chain comprises SEQ ID NO:257, and the nucleotide sequence encoding the beta or delta chain comprises SEQ ID NO:263;
[0595] (s) the nucleotide sequence encoding the alpha or gamma chain comprises SEQ ID NO:273, and the nucleotide sequence encoding the beta or delta chain comprises SEQ ID NO:275; or
[0596] (t) the nucleotide sequence encoding the alpha or gamma chain comprises SEQ ID NO:283, and the nucleotide sequence encoding the beta or delta chain comprises SEQ ID NO:289.
[0597] 23. The polynucleotide of any of embodiments 17-22, wherein the nucleotide sequence encoding the alpha chain and the nucleotide sequence encoding the beta chain are separated by a peptide sequence that causes ribosome skipping.
[0598] 24. The polynucleotide of embodiment 23, wherein the peptide that causes ribosome skipping is a P2A peptide.
[0599] 25. The polynucleotide of embodiment 24, wherein the P2A peptide comprises SEQ ID NO:352.
[0600] 26. The polynucleotide of embodiment 24 or 25, wherein the sequence encoding the P2A peptide is set forth in SEQ ID NO:351.
[0601] 27. The polynucleotide of any one of embodiments 17-26, wherein:
[0602] (a) the nucleotide sequence encodes SEQ ID NO:18;
[0603] (b) the nucleotide sequence encodes SEQ ID NO:34;
[0604] (c) the nucleotide sequence encodes SEQ ID NO:50;
[0605] (d) the nucleotide sequence encodes SEQ ID NO:64;
[0606] (e) the nucleotide sequence encodes SEQ ID NO:75;
[0607] (f) the nucleotide sequence encodes SEQ ID NO:91;
[0608] (g) the nucleotide sequence encodes SEQ ID NO:105;
[0609] (h) the nucleotide sequence encodes SEQ ID NO:119;
[0610] (i) the nucleotide sequence encodes SEQ ID NO:133;
[0611] (j) the nucleotide sequence encodes SEQ ID NO:149;
[0612] (k) the nucleotide sequence encodes SEQ ID NO:165;
[0613] (l) the nucleotide sequence encodes SEQ ID NO:179;
[0614] (m) the nucleotide sequence encodes SEQ ID NO:193;
[0615] (n) the nucleotide sequence encodes SEQ ID NO:207;
[0616] (o) the nucleotide sequence encodes SEQ ID NO:221;
[0617] (p) the nucleotide sequence encodes SEQ ID NO:237;
[0618] (q) the nucleotide sequence encodes SEQ ID NO:251;
[0619] (r) the nucleotide sequence encodes SEQ ID NO:265;
[0620] (s) the nucleotide sequence encodes SEQ ID NO:277;
[0621] (t) the nucleotide sequence encodes SEQ ID NO:291;
[0622] (u) the nucleotide sequence encodes SEQ ID NO: 367;
[0623] (v) the nucleotide sequence encodes SEQ ID NO: 377;
[0624] (w) the nucleotide sequence encodes SEQ ID NO: 387;
[0625] (x) the nucleotide sequence encodes SEQ ID NO: 397;
[0626] (y) the nucleotide sequence encodes SEQ ID NO: 407;
[0627] (z) the nucleotide sequence encodes SEQ ID NO: 417;
[0628] (aa) the nucleotide sequence encodes SEQ ID NO: 427;
[0629] (ab) the nucleotide sequence encodes SEQ ID NO: 437;
[0630] (ac) the nucleotide sequence encodes SEQ ID NO: 447;
[0631] (ad) the nucleotide sequence encodes SEQ ID NO: 457; or
[0632] (ae) the nucleotide sequence encodes SEQ ID NO: 488.

[0633] 28. The polynucleotide of any one of embodiments 17-27, wherein:
[0634] (a) the nucleotide sequence comprises SEQ ID NO:17;
[0635] (b) the nucleotide sequence comprises SEQ ID NO:33;
[0636] (c) the nucleotide sequence comprises SEQ ID NO:49;
[0637] (d) the nucleotide sequence comprises SEQ ID NO:63;
[0638] (e) the nucleotide sequence comprises SEQ ID NO:74;
[0639] (f) the nucleotide sequence comprises SEQ ID NO:90;
[0640] (g) the nucleotide sequence comprises SEQ ID NO:104;
[0641] (h) the nucleotide sequence comprises SEQ ID NO:118;
[0642] (i) the nucleotide sequence comprises SEQ ID NO:132;
[0643] (j) the nucleotide sequence comprises SEQ ID NO:148;
[0644] (k) the nucleotide sequence comprises SEQ ID NO:164;
[0645] (l) the nucleotide sequence comprises SEQ ID NO:178;
[0646] (m) the nucleotide sequence comprises SEQ ID NO:192;
[0647] (n) the nucleotide sequence comprises SEQ ID NO:206;
[0648] (o) the nucleotide sequence comprises SEQ ID NO:220;
[0649] (p) the nucleotide sequence comprises SEQ ID NO:236;
[0650] (q) the nucleotide sequence comprises SEQ ID NO:250;
[0651] (r) the nucleotide sequence comprises SEQ ID NO:264;
[0652] (s) the nucleotide sequence comprises SEQ ID NO:276;
[0653] (t) the nucleotide sequence comprises SEQ ID NO:290;
[0654] (u) the nucleotide sequence comprises SEQ ID NO: 368;
[0655] (v) the nucleotide sequence comprises SEQ ID NO: 378;
[0656] (w) the nucleotide sequence comprises SEQ ID NO: 388;
[0657] (x) the nucleotide sequence comprises SEQ ID NO: 398;
[0658] (y) the nucleotide sequence comprises SEQ ID NO: 408;
[0659] (z) the nucleotide sequence comprises SEQ ID NO: 418;
[0660] (aa) the nucleotide sequence comprises SEQ ID NO: 428;
[0661] (ab) the nucleotide sequence comprises SEQ ID NO: 438;
[0662] (ac) the nucleotide sequence comprises SEQ ID NO: 448;
[0663] (ad) the nucleotide sequence comprises SEQ ID NO: 458; or
[0664] (ae) the nucleotide sequence comprises SEQ ID NO: 489.
[0665] 29. A vector comprising the nucleic acid of any of embodiments 17-28.
[0666] 30. The vector of embodiment 29, wherein the vector is a viral vector.
[0667] 31. The vector of embodiment 30, wherein the viral vector is a lentiviral vector.
[0668] 32. An engineered cell, comprising the TCR or antigen-binding fragment thereof of any of embodiments 1-16.
[0669] 33. An engineered cell, comprising the polynucleotide of any of embodiments 17-28 or the vector of any of embodiments 29-31.
[0670] 34. The engineered cell of embodiment 32 or 33, wherein the TCR or antigen-binding fragment thereof is heterologous to the cell.
[0671] 35. The engineered cell of any of embodiments 32-34, wherein the engineered cell is a cell line.
[0672] 36. The engineered cell of any of embodiments 32-34, wherein the engineered cell is a primary cell obtained from a subject.
[0673] 37. The engineered cell of any of embodiments 32-36, wherein the engineered cell is a T cell.
[0674] 38. A method for producing an engineered cell, comprising introducing the polynucleotide of any of embodiments 17-28 or the vector of any of embodiments 29-31 into a cell in vitro or ex vivo.
[0675] 39. A composition comprising the TCR or antigen-binding fragment thereof of any of embodiments 1-16, the polynucleotide of any of embodiments 17-28, the vector of any of embodiments 29-31, or the engineered cell of any of embodiments 32-37.
[0676] 40. The composition of embodiment 39, further comprising a pharmaceutically acceptable excipient.
[0677] 41. A method for identifying a T cell receptor (TCR) targeting a hematopoietically restricted minor histocompatibility antigen (miHA), the method comprising identifying a functional TCR that recognizes a hematopoietically-restricted miHA, among a plurality functional TCRs, wherein said plurality of functional TCRs are encoded by a plurality of functional TCR-encoding nucleic acid vectors generated by a high-throughput nucleic acid amplification and assembly method using nucleic acid obtained from a single T cell among a plurality of T cells; wherein said plurality of T cells is from a human female donor that is pregnant with or has been pregnant with a fetus with a mismatched or immunogenic hematopoietically restricted miHA.
[0678] 42. A method for identifying a T cell receptor (TCR) targeting a hematopoietically restricted minor histocompatibility antigen (miHA), the method comprising:
[0679] (i) generating a plurality of functional TCR-encoding nucleic acid vectors by a high-throughput nucleic acid amplification and assembly method using nucleic acid obtained from a single T cell among a plurality of T cells; wherein said T cell is from a human female donor that is pregnant with or has been pregnant with a fetus with a mismatched or immunogenic hematopoietically restricted miHA; and
[0680] (ii) identifying a functional TCR that recognizes a hematopoietically-restricted miHA, among a plurality functional TCRs encoded by the plurality of functional TCR-encoding nucleic acid vectors.
[0681] 43. The method of embodiment 41 or 42, wherein the hematopoietically restricted miHA is a minor histocompatibility antigen HA-1.
[0682] 44. The method of any of embodiments 41-43, wherein the identified functional TCR recognizes a peptide epitope of a minor histocompatibility antigen HA-1 in the context of an MHC molecule.
[0683] 45. The method of embodiment 44, wherein the MHC molecule is a human leukocyte antigens (HLA)-A molecule.
[0684] 46. The method of embodiment 45, wherein the HLA-A molecule is of serotype HLA-A*02:01.
[0685] 47. The method of embodiment 45, wherein the HLA-A molecule is of serotype HLA-A*02:06.
[0686] 48. The method of any of embodiments 44-47, wherein the peptide epitope of HA-1 is set forth in SEQ ID NO:354.
[0687] 49. The method of any of embodiments 41-48, wherein the T cell from the human female donor is cultured under conditions for cell expansion of the T cell prior to the generating of the plurality of functional TCR-encoding nucleic acid vectors.
[0688] 50. The method of any of embodiments 41-48, wherein the T cell from the human female donor is not cultured under conditions for cell expansion of the T cell prior to the generating of the plurality of functional TCR-encoding nucleic acid vectors.
[0689] 51. The method of any of embodiments 41-50, wherein the high-throughput nucleic acid amplification and assembly method comprises:

[0690] (1) amplifying a first amplification product and a second amplification product from complementary DNA (cDNA) generated from RNA obtained from the single T cell among the plurality of T cells sorted into each of a plurality of separate locations of a device, wherein:
[0691] said first amplification product comprises a nucleotide sequence encoding a full-length variable alpha (Vα) region or a full-length variable gamma (Vγ) region of a TCR, and said second amplification product comprises a nucleotide sequence encoding a full-length variable beta (Vβ) region or a full-length variable delta (Vδ) region of a TCR; and
[0692] (2) assembling said first amplification product and said second amplification product from each of said plurality of separate locations into a nucleic acid vector to obtain an assembled nucleic acid vector comprising a nucleotide sequence encoding a functional TCR for each of said plurality of separate locations; and
[0693] said functional TCR comprises (i) a full-length Vα region and a full-length Vβ region from said single T cell or (ii) a full-length Vγ region and a full-length Vδ region from said single T cell.
[0694] 52. An engineered cell, comprising the TCR identified by the method of any of embodiments 41-51.
[0695] 53. A composition comprising the engineered cell of embodiment 52.
[0696] 54. The composition of embodiment 53, further comprising a pharmaceutically acceptable excipient.
[0697] 55. A method of treatment, the method comprising administering the TCR or antigen-binding fragment thereof of any of embodiments 1-16, the polynucleotide of any of embodiments 17-28, the vector of any of embodiments 29-31, the engineered cell of any of embodiments 32-37 or 52, or the composition of any of embodiments 39, 40, 53 and 54, to a subject having a disease or a disorder.
[0698] 56. The method of embodiment 55, wherein the subject is eligible for or is to receive an allogeneic hematopoietic stem cell transplantation (HSCT).
[0699] 57. The method of embodiment 55 or 56, wherein the subject has or has been diagnosed with a malignant hematologic disorder.
[0700] 58. The method of any of embodiments 55-57, wherein the subject has or has been diagnosed with acute myeloid leukemia (AML), myelodysplastic syndrome (MDS), or acute lymphoblastic leukemia (ALL).
[0701] 59. The method of any of embodiments 55-58, wherein the administering step induces or enhances cells death of cells associated with the malignant hematologic disorder, or induces or enhances a graft versus leukemia effect (GVL) in the subject.
[0702] 60. The TCR or antigen-binding fragment thereof of any of embodiments 1-16, the polynucleotide of any of embodiments 17-28, the vector of any of embodiments 29-31, the engineered cell of any of embodiments 32-37 or 52, or the composition of any of embodiments 39, 40, 53 and 54, for use in the treatment of a disease or a disorder in a subject.
[0703] 61. Use of the TCR or antigen-binding fragment thereof of any of embodiments 1-16, the polynucleotide of any of embodiments 17-28, the vector of any of embodiments 29-31, the engineered cell of any of embodiments 32-37 or 52, or the composition of any of embodiments 39, 40, 53 and 54, in the manufacture of a medicament for the treatment of a disease or a disorder in a subject.
[0704] 62. Use of the TCR or antigen-binding fragment thereof of any of embodiments 1-16, the polynucleotide of any of embodiments 17-28, the vector of any of embodiments 29-31, the engineered cell of any of embodiments 32-37 or 52, or the composition of any of embodiments 39, 40, 53 and 54, for the treatment of a disease or a disorder in a subject.

### VIII. EXAMPLES

[0705] The following examples are included for illustrative purposes only and are not intended to limit the scope of the invention.

### Example 1: Donor Selection and Candidate T Cell Receptor Screening

[0706] T cells expressing TCRs that can target hematopoietically-restricted miHA HA-1 were obtained from parous women, and screened for binding to particular HA-1 peptide variants.

### A. Donor Criteria

[0707] T cells expressing a TCR that can target an immunogenic alleles of a miHA were obtained from parous women, as they may have been naturally immunized to paternal allele of the miHA from the fetus during pregnancy and at the time of delivery. Donor T cells were isolated and screened for their ability to specifically target an immunogenic allele of the hematopoietically-restricted miHA HA-1.

[0708] Blood of multiparous volunteers was analyzed using whole exome sequencing to determine their HLA repertoire and polymorphisms encoding the HLA-A*0201 restricted HA-1 peptide (VLHDDLLEA; SEQ ID NO:354) or the non-immunogenic “R” variant (VLRDDLLEA; SEQ ID NO:355). Volunteers having an appropriate HLA type, i.e., an HLA-A*02:01 restricted HA-1 R/R phenotype, were selected as potential donors. Donor candidacy was further assessed by genotyping the volunteer's child or the father of said child to determine the presence of HA-1 H/H or HA-1 H/R. Detection of either “H” phenotype from the child or the father was indicative of potential exposure to the mother's immune system during pregnancy/childbirth. PBMCs were drawn from donors who met the described criteria.

### B. PBMC Screening to Identify HA-1-Targeting T Cells

[0709] Collected PBMCs were either directly screened for the presence of HA-1-specific T cells or first expanded in vitro. Using cells from the same donor, unexpanded and expanded cultures were compared to inform future screening strategies.

### 1. Direct Sample Screening

[0710] Donor cells were stained with an APC A*0201/HA-1 fluorescent labeled dextramer then sorted using fluorescence-activated cell sorting (FACS). From 5×10⁷ PBMCs, 47 single CD8+ T cells stained positive for HA-1. The HA-1 reactive cells were then added to a 384-well plate for further processing.

### 2. Expanded Culture Screening

[0711] 3.4×10⁷ PBMCs from the same donor were expanded in vitro using either the naked peptide or the peptide in the presence of donor B cells. In the first approach, resident antigen presenting cells (APCs) in the PBMC sample were stimulated by adding 10 μg/ml of the HA-1 “H” peptide. The cells were then cultured in the presence of cytokines for 10 days. In the second approach, CD19+B cells (B-APCs) were similarly co-cultured for 10 days at a 1:10 B-APC/PBMC ratio, again in the presence of cytokines.

[0712] At day 10, samples from both cultures were analyzed by FACS for expansion. Cells were stained with an irrelevant A*0201 dextramer for counter-selection. Two HA-1/A*0201 dextramers, one labeled with APC, the other with FITC, were used to detect desirably reactive TCRs. FIG. 1 shows the detection of double positive cells in both expanded cell cultures, indicating the potential presence of specific HA-1 TCRs. 704 total CD8+ T cells were added to 384-well plates for amplification, cloning and assessment based on a high-throughput TCR amplification and assessment methods as described in Example 2 below.

### Example 2: High-Throughput TCR Chain Amplification and Expression

[0713] Sorted T cells that potentially express TCRs specific for an immunogenic allele of HA-1 obtained from multiparous women, as described in Example 1 above, were assessed using a high-throughput TCR cloning and identification method.

### A. TRAV/TRBV Amplification

[0714] Cells in 384-well plates were stained with a FITC/APC HA-1 dextramer prior to analysis. Cells that stained double-positive for FITC/APC HA-1 dextramer were single cell sorted using FACS.

[0715] The T cell receptor alpha variable (TRAV) and T cell receptor beta variable (TRBV) chains of the sorted cells were amplified using a high throughput method, generally as described in WO 2018/102473. TRAV was efficiently amplified (concentrations of more than 5 ng/μl DNA) in 683 wells (97%), and TRBV in 632 wells (90%), resulting in an overall amplification of 625 TCR alpha/beta pairs (89%). Amplified TRAV/TRBV from each of the sorted cells were assembled into a lentivirus plasmid vector, resulting in the generation of 701/704 positive bacterial cultures, an indication of proper plasmid assembly.

### B. Cell Surface Expression and Target Binding

[0716] Plasmids were extracted using an automated platform, and were transfected at once using robotics into an HEK293 cell line engineered to permit surface TCR expression by cells expression of human CD3γ, CD3δ, CD3ε, CD3ζ (polyCD3) and human CD8 α/β.

[0717] After 24 hours, cells were stained with both an anti-CD3 antibody, to determine surface TCR expression, and an HA-1 dextramer to screen for specific T cell receptors. FIG. 2 shows the FACS analysis of the controls. A model HA-1 receptor identified from non-expanded screen was used as a positive control showing both CD3 and HA-1 dextramer staining. An ACC-1 TCR derived from a separate screen was used as a negative control, exhibiting surface TCR expression by the CD3 staining but no specific binding to the HA-1 dextramer.

[0718] As depicted in FIG. 3, FACS analysis after the transient expression of 701 clones into HEK293 cells showed that there were 103 clones having higher surface TCR expression than the positive control (blue), 174 clones below the negative control (yellow), and 427 that fell in between (green). Overall, productive TCR expression was observed in 75% (504/704) of clones from expanded cells.

[0719] For T cells that stained positive for HA-1 obtained from direct sample screening (Example 1.B.1 above), the sequences encoding the TCR were assembled into a lentivirus vector that co-expresses a red fluorescent marker (mCherry) as a transfection efficiency control. The plasmids were directly transiently transfected into the engineered HEK293 cells permissive for surface expression of TCRs.

[0720] After overnight incubation, cells were assessed by FACS. A high transfection efficiency was observed in HEK cells transfected with TCRs from unexpanded cells. As shown in FIG. 4A, 40 out of 47 (85%) transfections resulted in TCR expression as determined by staining with a monoclonal antibody IP26 that detects TCR surface expression. As shown in FIG. 4B, 30/40 stained positive with the HA-1 dextramer.

### C. TRBV Sequencing

[0721] TRBVs were sequenced in parallel with the expression screen described above to assess expansion and clonality. From the 704 originally selected expanded cells, 531 readable sequences were generated. FIG. 5 shows that the TRBV7-9 gene was present in the majority of isolated TCR beta chains. The data was similar to TRBV sequencing results of unexpanded cells.

[0722] This result indicates significant enrichment via successful expansion of specific HA-1 T cells. Overall, 26 different TRBV genes were detected. There was no association between TRBV chain type and TCR expression.

### D. TCR Attributes of Unexpanded and Expanded Donor PBMCs

[0723] The TCRs from T cells from unexpanded and expanded screens as described in Example 1 were analyzed to assess clonal distribution and sensitivity of the high-throughput TCR identification method.

[0724] FIG. 6 shows the distribution of non-singleton clones from the expanded and non-expanded T cells as described in Example 1. Sequencing of 30 clones that stained positive with the HA-1 dextramer from the direct sample screening showed 15 distinct clones, based on their unique TRAV and TRBV sequences. As shown in FIG. 6, 9 out of the 15 most prevalent TCRs in the expanded screen were identified without any expansion (purple bars). With regard to the expanded cells, only 4 clones were present in all three expanded populations. One particular clone was highly prevalent in all three expanded populations and in the non-expanded population, indicating that this particular clone was also the most abundant in the non-expanded population.

[0725] These results demonstrate the ability of the high-throughput screening methods to identify candidate TCRs with desired features, even when they are sparsely represented, as in an unexpanded sample. The results support a substantial advantage of the described high-throughput screening method to identify TCRs of interest without the requirement of expansion, particularly in contexts in which screening is time sensitive, processing can jeopardize sample integrity, or when expansions are not guaranteed, such as for tumor infiltrating lymphocytes. Surprisingly, functional TCRs were cloned and expressed even in samples with low levels of TRAV/TRBV amplification. These results show the efficiency and the utility of the cloning methods, even when low levels of amplification products are available.

### Example 3: Exemplary Identified TCRs

[0726] The Examples describe the successful isolation, cloning, screening, identification, sequence determination and characterization of minor histocompatibility HA-1-specific TCRs. The TCRs were obtained from parous women and screened using a high-throughput method to obtain full length TCRs. From one population of screened T cells, 30 out of 47 isolated cells were positive for HA-1 specific binding and represented 15 unique TCR clones. Three (3) TCRs exhibited an EC₅₀) below 200 nM against the immunogenic HA-1 peptide, and many TCRs exhibited a more than 100-fold specificity towards the immunogenic H peptide of HA-1, compared to the non-immunogenic R peptide. Exemplary TCRs also recognized naturally expressed peptides in H:R or H:H cells, in a gene dose-dependent manner. Primary T cells expressing an exemplary HA-1 specific TCR exhibited target cell killing activity against cells loaded with the immunogenic H peptide, but not the non-immunogenic R peptide. No indication of alloreactivity was observed.

[0727] Table E1 lists the sequence identifiers (SEQ ID NO:) for amino acid (aa) or nucleotide (nt) sequences for exemplary HA-1 specific TCRs that were isolated, assessed, and sequenced using methods described above. The table also lists the sequence identifier (SEQ ID NO:) corresponding to an exemplary full-length, including the constant domains, amino acid sequence containing the alpha and beta chain sequences of each respective TCR, separated by a sequence encoding a ribosome-skip P2A sequence (P2A linker set forth in SEQ ID NO: 352 encoded by the nucleotides set forth in SEQ ID NO: 351) (designated “alpha-P2A-beta”).

TABLE E1
Amino Acid and Nucleotide Sequences of HA-1 Specific TCRs

| | | | | | | | | | | | Full | |
|---|---|---|---|---|---|---|---|---|---|---|---|---|
| | | | | | | | | | | | length | |
| | Alpha variable | | | | | Beta variable | | | | | alpha- | |
| | | | CDR- | CDR- | CDR- | | | CDR- | CDR- | CDR- | P2A-beta | |
| TCR | nt | aa | 1 (aa) | 2 (aa) | 3 (aa) | nt | aa | 1 (aa) | 2 (aa) | 3 (aa) | nt | aa |
| TCR A | 7 | 4 | 1 | 2 | 3 | 15 | 12 | 9 | 10 | 11 | 17 | 18 |
| TCR B | 25 | 22 | 19 | 20 | 21 | 31 | 28 | 9 | 10 | 27 | 33 | 34 |
| TCR C | 41 | 38 | 35 | 36 | 37 | 47 | 44 | 9 | 10 | 43 | 49 | 50 |
| TCR D | 55 | 52 | 1 | 2 | 51 | 61 | 58 | 9 | 10 | 57 | 63 | 64 |
| TCR E | 69 | 66 | 1 | 2 | 65 | 72 | 58 | 9 | 10 | 57 | 74 | 75 |
| TCR F | 82 | 79 | 76 | 77 | 78 | 88 | 85 | 9 | 10 | 84 | 90 | 91 |
| TCR G | 96 | 93 | 19 | 20 | 92 | 102 | 99 | 9 | 10 | 98 | 104 | 105 |
| TCR H | 110 | 107 | 76 | 77 | 106 | 116 | 113 | 9 | 10 | 112 | 118 | 119 |
| TCR I | 124 | 121 | 35 | 36 | 120 | 130 | 127 | 9 | 10 | 126 | 132 | 133 |
| TCR J | 140 | 137 | 134 | 135 | 136 | 146 | 143 | 9 | 10 | 142 | 148 | 149 |
| TCR K | 156 | 153 | 150 | 151 | 152 | 162 | 159 | 9 | 10 | 158 | 164 | 165 |
| TCR L | 170 | 167 | 35 | 36 | 166 | 176 | 173 | 9 | 10 | 172 | 178 | 179 |
| TCR M | 184 | 181 | 35 | 36 | 180 | 190 | 187 | 9 | 10 | 186 | 192 | 193 |
| TCR N | 198 | 195 | 76 | 77 | 194 | 204 | 201 | 9 | 10 | 200 | 206 | 207 |
| TCR O | 212 | 209 | 76 | 77 | 208 | 218 | 215 | 9 | 10 | 214 | 220 | 221 |
| TCR P | 228 | 225 | 222 | 223 | 224 | 234 | 231 | 9 | 10 | 230 | 236 | 237 |
| TCR Q | 242 | 239 | 76 | 77 | 238 | 248 | 245 | 9 | 10 | 244 | 250 | 251 |
| TCR R | 256 | 253 | 19 | 20 | 252 | 262 | 259 | 9 | 10 | 258 | 264 | 265 |
| TCR S | 272 | 269 | 266 | 267 | 268 | 274 | 159 | 9 | 10 | 158 | 276 | 277 |
| TCR T | 282 | 279 | 19 | 20 | 278 | 288 | 285 | 9 | 10 | 284 | 290 | 291 |
| TCR U | | 360 | | | 359 | | 364 | 9 | 10 | 363 | 368 | 367 |
| TCR V | | 370 | | | 369 | | 374 | 9 | 10 | 373 | 378 | 377 |
| TCR W | | 380 | | | 379 | | 384 | 9 | 10 | 383 | 388 | 387 |
| TCR X | | 390 | | | 389 | | 394 | 9 | 10 | 393 | 398 | 397 |
| TCR Y | | 400 | | | 399 | | 404 | 9 | 10 | 403 | 408 | 407 |
| TCR Z | | 410 | | | 409 | | 414 | 9 | 10 | 413 | 418 | 417 |
| TCR AA | | 420 | | | 419 | | 424 | 9 | 10 | 423 | 428 | 427 |
| TCR AB | | 430 | | | 429 | | 434 | 9 | 10 | 433 | 438 | 437 |
| TCR AC | | 440 | | | 439 | | 444 | 9 | 10 | 443 | 448 | 447 |
| TCR AD | | 450 | | | 449 | | 454 | 9 | 10 | 453 | 458 | 457 |
| TCR AJ | | 481 | | | 480 | | 485 | | | 484 | 489 | 488 |

### Example 4: Characterization of Exemplary HA-1 Specific TCRs

[0728] As described herein, minor histocompatibility antigens (miHAs) relatively restricted to hematopoietic cells are ideal targets for adoptive T cell immunotherapy in the context of allogeneic stem cell transplantation (alloSCT), as T cells that target them can mediate graft-versus-leukemia and promote engraftment with a low risk for graft-vs-host disease. Multiple exemplary TCRs reactive against the hematopoietic cell-restricted miHA HA-1, isolated from a parous woman who was naturally immunized to HA-1 through pregnancy and identified using the high-throughput screening method generally as described in Examples 1-3 above, were characterized.

[0729] In summary, an HLA-A*02:01 woman homozygous for the non-immunogenic HA-1 (R/R) allele who delivered three children with an HA-1 heterozygous (H/R) HLA-A*02:01 father was identified. TCRs were cloned from single-cell-sorted HA-1 dextramer+(dex^{HA-1+}) CD8⁺ T cells from unstimulated peripheral blood mononuclear cells (PBMCs) and subsequently from the CD8⁺ T cells co-cultured for one week with HA-1 peptide-pulsed antigen-presenting cells (APCs). TCRs were re-expressed in reporter cells using lentivirus vectors and analyzed for dextramer binding and CD69 upregulation after culture with HA-1(H) peptide-pulsed APCs. Cloned TCRs were sequenced to characterize TCR diversity.

[0730] Sixteen (16) unique HA-1-reactive TCRs from 48 sorted dex^{HA-1+} CD8⁺ T cells from unstimulated PBMCs. 704 additional TCRs were cloned from HA-1 peptide-stimulated CD8 cells. When re-expressed, 440 bound HA-1(H) dextramer with various intensities, as shown in FIG. 7. HA-1 specific TCRs exhibited a broad range of EC₅₀s, although they all used TRBV7-9, as shown in FIG. 8. Exemplary HA-1 TCR clones, when re-expressed in primary CD8+ T cells, killed HA-1+ target cells.

[0731] The results are consistent with the isolation of various TCRs exhibiting a wide range of affinities against a single allopeptide/HLA complex (VLHDDLLEA/HLA-A*02:01). The results support the utility of the described approaches to clone and characterize TCRs targeting hematopoietically restricted miHAs, for adoptive T cell therapy in alloSCT.

### Example 5: Binding Specificity of Exemplary HA-1 Specific TCR

[0732] Binding specificity of the HA-1 specific TCRs was determined using dextramers complexed with immunogenic or non-immunogenic HA-1 peptides.

[0733] HEK293 suspension cells engineered to express human CD3γ, CD3δ, CD3ε, CD3ζ (polyCD3) and human CD8 α/β. CD3 and CD8 were cloned from pooled PBMCs from two healthy blood donors and introduced into HEK293 cells using separate expression plasmids. Suspension HEK293-CD3-CD8 cells were transiently transfected with plasmid DNA containing an anti-HA-1 TCR and the fluorescent protein mCherry, as a transfection efficiency control.

[0734] Twenty-four hours after transfection, cells were stained with an amine-reactive viability dye (violet 510 Ghost dye), anti-CD3 and the immunogenic HA-1 “H” peptide dextramer or non-immunogenic HA-1 “R” peptide dextramer. Cells were acquired and analyzed by flow cytometry.

[0735] Double positive fluorescence of mCherry and specific binding of HLA-dextramers complexed with the HA-1 “H” peptide indicated a functional and desirably reactive TCR. FIG. 9 shows the transfection efficiency and enhanced “H” peptide binding of an exemplary TCR. The results demonstrate the ability of the high-throughput screening methods to identify candidate TCRs that can specifically distinguish an immunogenic allele of HA-1 (from transplant cell donor) from a non-immunogenic allele (from transplant recipient).

### Example 6: In Vitro Evaluation of Engineered T Cell Reactivity to Hematopoietically Restricted Minor Histocompatibility Antigen HA-1

[0736] TCRs isolated and identified as described in Examples 1-3 above were recombinantly expressed in a cell line, further characterized and assessed for function, including cytokine secretion, T cell activation and binding specificity.

### A. Cytokine Secretion

[0737] To assess the function of anti-HA-1 TCR-bearing T cells, the secretion of IL-2, an activation-induced cytokine, in response to co-culture with peptide-loaded APCs was investigated using an enzyme-linked immune absorbent spot (ELISpot) assay.

[0738] A Jurkat J.RT3-T3.5-CD8 T-cell stable cell line was engineered to express human CD8α/β. CD8 was cloned from mixed PBMCs from two healthy donors. The cell line was then transduced with a lentivirus (pLVX-Puro, Clontech Laboratories, Inc.) expressing the various HA-1 TCR identified as described above.

[0739] The transduced Jurkat T cells were co-incubated overnight with A*0201 HLA Lymphoblastoid Cell Lines (LCLs) that are used for presentation into various MHC molecules and serve as APCs, at a 1:1 effector to target ratio (E/T) in the presence or absence of the immunogenic HA-1 H peptide (VLHDDLLEA). Analysis of cell mixtures using ELISpot was performed according to the manufacturer's instructions (Human IL-2 ELISpotbasic, MabTech) to assess the ability of the Jurkat T cells to secrete IL-2 in the presence of APCs presenting the target HA-1 peptide.

[0740] FIG. 10 shows exemplary results of the IL-2 secretion for various TCRs. The number and intensity of spots indicated the level of IL-2 secretion. The results confirmed target-specific T cell activation of the TCR expressing cells, and showed that receptors with different activities were isolated.

[0741] For an exemplary HA-1 specific TCR, Jurkat T cells expressing the HA-1 TCR were co-cultured with T2 lymphoblast cells pulsed with HA-1 “H” or HA-1 “R” peptide. Equal numbers of Jurkat T cells and T2 cells loaded with increasing concentrations (0.1-31.6 ng/ml) of either HA-1 peptide were co-cultured for 16 hours. IL-2 secretion was assessed by an ELISpot as above. Jurkat T cells without T2 APCs and T2 APCs without Jurkat T cells served as negative controls.

[0742] FIG. 11 shows the results of IL-2 secretion based on presentation of allele-specific HA-1 peptide, for cells expressing an exemplary TCR. As shown in FIG. 11, the presentation of increasing amounts of immunogenic HA-1 “H” peptide resulted in increased IL-2 secretion of T cells expressing the exemplary HA-1 TCR. Interestingly, across the same tested peptide concentrations, IL-2 secretion in response to the HA-1 “R” peptide was minimal. Observing IL-2 secretion from engineered HA-1 T cells in response to the target confirms target-specific functionality of the identified TCR.

### B. Assessment of Early Activation Marker CD69

[0743] Expression of CD69, a marker of T cell activation and function, was assessed following co-culture of Jurkat T cells expressing an HA-1 TCR with APCs loaded with HA-1 peptides.

[0744] Jurkat J.RT3-T3.5-CD8 T cells expressing various anti-HA-1 TCRs were prepared as described above in Example 4.A. Jurkat cells transduced with anti-HA-1 TCRs were incubated overnight with A*0201 LCLs at a 1:1 E/T ratio in the presence of increasing concentrations of HA-1. FIG. 12 shows the percentage of CD69+ cells of twelve different TCR clones over a span of peptide concentrations. The EC₅₀ values were calculated based on XLfit (ID Business Solutions) on plots of the percentage of CD69+ cells (y-axis) vs. peptide concentration (logarithmic x-axis). Table E3 lists the determined EC₅₀ values for CD69 expression for the exemplary HA-1-specific TCRs. Several clones were found to exhibit an EC₅₀ at low double-digit nM range, indicating high affinity binding to LCLs loaded with cognate peptides. The results showed a broad range of EC₅₀ values, showing a surprising functional diversity of the identified TCRs despite all using the TRBV7-9 gene; except, TCR AJ, which used the TRBV5-5 gene.

TABLE E3
EC₅₀ for CD69 Expression in Exemplary HA-1 Specific TCRs

| | EC₅₀ (ng/mL) | EC₅₀ (nM) |
|---|---|---|
| TCR A | <10 | <10 |
| TCR B | 10-100 | 10-100 |
| TCR C | <10 | <10 |
| TCR D | <10 | <10 |
| TCR E | <10 | <10 |
| TCR F | <10 | <10 |
| TCR G | 10-100 | 10-100 |
| TCR H | 10-100 | 10-100 |
| TCR I | 10-100 | 10-100 |
| TCR J | 10-100 | 10-100 |
| TCR K | 10-100 | 10-100 |
| TCR L | 10-100 | 10-100 |
| TCR M | 10-100 | 10-100 |
| TCR N | 10-100 | 10-100 |
| TCR O | 10-100 | 10-100 |
| TCR P | 10-100 | 10-100 |
| TCR Q | 100-1000 | 100-1000 |
| TCR R | 100-1000 | 100-1000 |
| TCR S | 100-1000 | 100-1000 |
| TCR T | 100-1000 | 100-1000 |

TABLE E3-1
EC50 values for CD69 Expression
in Exemplary HA-1 Specific TCRs

| | EC₅₀ (ng/mL) |
|---|---|
| TCR U | 12.73 |
| TCR V | 124.51 |
| TCR W | 7.18 |
| TCR X | 23.55 |
| TCR Y | 10.84 |
| TCR Z | 1.5 |
| TCR AA | 1.1 |
| TCR AB | 40.2 |
| TCR AC | 0.9 |
| TCR AD | 4.9 |
| TCR AJ | 5.0 |

TABLE E3-1
EC50 values for CD69 Expression in Exemplary
engineered HA-1 Specific TCRs

| | EC₅₀ (ng/mL) |
|---|---|
| TCR AE | 2.77 |
| TCR AF | 2.49 |
| TCR AG | 2.27 |
| TCR AH | 3.4 |
| TCR AI | 9.2 |

[0745] For an exemplary TCR, the anti-HA-1 TCR-expressing T cells were co-cultured in duplicate at a 1:1 effector-to-target ratio with peptide-loaded T2 cells. After 16-24 hours of culture, cells are washed and stained with Ghost Dye, anti-CD3 and anti-CD69 and assessed by flow cytometry. Data were analyzed by XLFit. The estimated EC₅₀ of each of the five experimental runs was determined by assessing the ratio of CD69 positive Jurkat cells to total live cells.

[0746] As shown in FIG. 13A (showing data from a single representative experiment), co-culturing T cells expressing an exemplary anti-HA-1 TCR with T2 cells loaded with increasing concentration of HA-1 “H” peptide (greater than a five log₁₀ concentration span), analyzed by flow cytometry for the percentage of cells positive for CD69, exhibits a corresponding increase of CD69 positive T cells. FIG. 13B is a graphical representation of the EC₅₀ determined for the HA-1 TCR from 6 separate experiments to show reproducibility and to determine a population mean with standard deviation. The mean EC₅₀, the average level of HA-1 “H” peptide necessary to produce CD69 upregulation in 50% of live T cells, was 7.4+5.9 ng/ml. Percentage of CD69+ cells did not increase in response to co-culture with T2 cells pulsed with the “R” peptide, suggesting specificity of the transduced T cells for the HA-1 “H” target.

[0747] The EC₅₀ of CD69 expression for an exemplary HA-1 TCR isolated as described above, was compared to the EC₅₀ of known anti-HA-1 TCRs, reconstructed from published sequences. As shown in FIG. 14, an exemplary TCR identified using the methods described in Examples 1-3 above was found to have a three- to eleven-fold lower EC₅₀ for CD69 activation, which indicates a comparable, if not greater, potency in a reconstructed CD69 activation assay.

### C. Assessment of T Cell Receptor Specificity

[0748] Specificity of the candidate HA-1 targeting TCRs against the HA-1 “H” versus “R” peptide presented by the restricting HLA, or potentially other HLA molecules, or other HLA molecules presenting other peptides, were assessed.

### 1. LCL and Target Specificity

[0749] The specificity against the immunogenic HA-1 “H” allele compared to the non-immunogenic “R” allele was assessed based on a CD69 expression assay using various LCLs displaying different HA-1 alleles.

[0750] Jurkat J.RT3-T3.5-CD8 T cells expressing the various anti-HA-1 TCR were co-cultured for 16 hours at a 1:1 effector to target ratio with HLA-A*02:01 restricted LCLs that displayed various HA-1 haplotypes (Astarte Biologics). Fifteen different LCLs, each characterized by the presence or absence of the HA-1 “H” peptide, were used in the study. Following co-incubation, cells were stained with violet 510 Ghost dye and APC-conjugated anti-CD69. Cells were assessed by flow cytometry.

[0751] As shown in FIG. 15, T cell lines expressing an exemplary anti-HA-1 TCR only resulted in CD69 activation when co-cultured with LCLs that both express HLA-A*02:01 and were loaded with the immunogenic allele of HA-1, indicating that the anti-HA-1 TCR recognizes HA-1 that is naturally processed by a target cell. Minimal non-specific reactivity was observed, even in response to HA-1 “H” peptides presented by non-HLA-A*02:01 LCLs or HA-1 “R” peptides presented by HLA-A*02:01 LCLs. In addition, a gene dosage effect was observed, showing approximately a two-fold higher activation by LCLs that were H/H homozygous compared to H/R heterozygous LCLs. The results show specific activation of exemplary anti-HA-1 TCR expressing cells.

### 2. Alloreactivity

[0752] Candidate TCRs were screened against a panel of HLA-typed LCLs to assess possible alloreactivity. Table E4 lists an exemplary panel with individual HLAs. Using a method similar to the CD69 activation assay described in Example 4.B above, HA-1 TCRs were assessed for alloreactivity against the panel of HLA Class I and Class II molecules shown in Table E4. None of the analyzed TCRs exhibited alloreactivity.

TABLE E4
HLA Locus Class I and Class II Panel

| HLA locus CLASS I | | | | HLA locus CLASS II | | | | | | | |
|---|---|---|---|---|---|---|---|---|---|---|---|
| A | B | Bw | C | DRB1 | DRB3 | DRB4 | DRB5 | DQB1 | DQA1 | DPB1 | DPA1 |

| | | | | | | | | |
|---|---|---|---|---|---|---|---|---|
| A*0101 | B*0702 | C*0202 | *0103 | *0101 | *01AC | *0201 | *0301 | *0101 |
| A*0201 | B*0801 | C*03 | *03 | *0202 | | *0301 | *0501 | *0201 |
| A*0301 | B*1501 | C*04 | *0401 | | | *0304 | *05EF | *0401 |
| A*1101 | B*18 | C*0501 | *0404 | | | | *05BFK | *0402 |
| A*23 | B*35 | C*0602 | *0701 | | | | | |
| A*2402 | B*37 | C*0701 | *08 | | | | | |
| A*30 | B*4002 | C*15 | *11 | | | | | |
| A*3101 | B*4402 | | *12 | | | | | |
| A*34 | B*45 | | *1301 | | | | | |
| A*68 | B*5101 | | *14 | | | | | |
| | B*5701 | | *1501 | | | | | |
| | | | *21 | | | | | |

[0753] The results showed that T cells expressing various TCRs targeting HA-1 isolated and identified as described in Examples 1-3 conferred target-specific T cell function, as shown by cytokine secretion and CD69 expression, in response to the presence of APCs presenting the immunogenic HA-1 peptide.

### Example 7: Target Cell Killing of Primary Cells Transduced with HA-1-Specific TCRs

[0754] To determine the potential for inducing a graft-versus-leukemia (GvL) effect, the anti-leukemia target cell killing activity of primary T cells transduced with an exemplary anti-HA-1 TCR was assessed.

### A. Expression of HA-1 Specific TCRs in Primary Cells

[0755] Primary human CD8+ T cells were enriched from PBMCs by negative selection. CD8+ T cells were then transduced with a lentivirus vector (pReceiver-LV230 expression vector, GeneCopoeia) containing one TCR among various anti-HA-1 TCRs and a puromycin resistance gene cassette. The transduced T cells were enriched for expression of the TCR using puromycin selection.

[0756] FIG. 16 shows the expression of an exemplary HA-1 TCR in human primary T cells, stained with an A*0201/HA-1 dextramer. As shown, nearly 50% of cells exhibited TCR expression following transduction.

### B. Target Cell Killing Specificity

[0757] The target cell killing specificity of an exemplary TCR was assessed. An LCL derived from a blood donor that was HLA typed was determined positive for the A*0201 MHC class I molecule and was used as an APC. The HA-1 genotype was R/R. Two populations of this LCL were stained either with high or low concentration of 5(6)-carboxyfluorescein diacetate N-succinimidyl ester (CFSE). CFSE labels target cells by binding of the dye to intracellular protein, and indicates T cell-mediated target cell killing. Apoptosis of labeled cells thereby results in the loss of their detection in the live cell gate in flow cytometry. The populations were loaded with the immunogenic “H” peptide, the non-immunogenic “R” peptide, or an unrelated (non-HA-1) peptide pp65 that binds to A*0201. Primary human T cells expressing an exemplary HA-1 TCR were co-cultured with the different target cells for 4 hours at an E:T ratio of 2.5:1. Cells were acquired and assessed by flow cytometry.

[0758] FIG. 17 shows flow cytometry plots showing populations of cells labeled with different CFSE levels, for peptide-loaded LCL populations following exposure to an exemplary HA-1 specific TCR. As shown in FIG. 17, when “H” peptide-loaded LCLs were present, only the non-“H” peptide-loaded populations were detected (second and third rows), showing specific elimination of “H” peptide-loaded LCLs. In comparison, when only “R” peptide-loaded LCLs or the unrelated pp65 peptide-loaded LCLs were present, both cell population labeled with high CFSE and low CFSE were observed (first and last rows). These results demonstrate specific killing of cells loaded with the immunogenic “H” peptide by the exemplary HA-1 specific TCRs, but not of cells loaded with the non-immunogenic “R” peptide or unrelated peptide pp65.

### C. Target Cell Killing Activity

[0759] The target cell killing activity of an exemplary TCR was further assessed at different effector:target (E:T) ratios.

[0760] LCLs were genotyped for the HA-1 haplotypes R/R (VLRDDLLEA) or H/H (VLHDDLLEA) (Astarte Biologics). In order to distinguish cell populations, LCLs presenting the “R” peptide were labeled with a low concentration of 5(6)-carboxyfluorescein diacetate N-succinimidyl ester (CFSE) (0.025 μM), while LCLs presenting the “H” peptide were labeled with a high concentration (0.5 μM) of CFSE. LCLs were stained with CFSE for 15 minutes at 37° C. HA-1 “H” or “R”-peptide-bearing LCLs were mixed together in a 1:1 ratio prior to incubation with increasing numbers of transduced primary T cells expressing an exemplary HA-1 specific TCR as identified and assessed in Examples 1˜4 above.

[0761] LCLs were co-cultured with increasing numbers of primary T cells for 16 hours (E:T ratios from 1:16 to 2:1). Cell mixtures were stained with LIVE/DEAD Fixable Violet Dead Cell Stain Kit (Thermo Fisher Scientific), anti-CD8 and anti-CD19, to assess the two distinct target cell populations by CFSE staining levels. Cells were acquired and analyzed by flow cytometry, assessing CD8− cells (to exclude effector cells) and the CFSE high versus CFSE low populations.

[0762] FIGS. 18A-18B show live cell counts of LCLs presenting either HA-1 “H” peptide or “R” peptide following incubation with non-transduced T cells and an exemplary anti-HA-1 TCR transduced T cells. As shown in FIGS. 18A-18B, loss of viable cells presenting HA-1 “H” peptide (high CFSE staining) was observed while numbers of viable cells presenting HA-1 “R” peptide (low CFSE staining) were retained, as the effector to target (E:T) ratio increased.

[0763] These results confirm that an exemplary anti-HA-1 TCR described in Examples 1˜4 above is capable of selective cell killing of target cells presenting the immunogenic HA-1 “H” peptide.

[0764] The present invention is not intended to be limited in scope to the particular disclosed embodiments, which are provided, for example, to illustrate various aspects of the invention. Various modifications to the compositions and methods described will become apparent from the description and teachings herein. Such variations may be practiced without departing from the true scope and spirit of the disclosure and are intended to fall within the scope of the present disclosure.

TABLE 4
Sequences

| SEQ | | |
|---|---|---|
| ID | | |
| NO | SEQUENCE | Description |
| 1 | VSGNPY | TCR A, D, E |
| | | Vα CDR-1 |
| 2 | YITGDNLV | TCR A, D, E |
| | | Vα CDR-2 |
| 3 | AVRGGSYKYI | TCR A Vα |
| | | CDR-3 |
| 4 | AQSVAQPEDQVNVAEGNPLTVKCTYSVSGNPYLFWYVQYPNRGLQFLLKYITGDNLVKGSYGF | TCR A Vα |
| | EAEFNKSQTSFHLKKPSALVSDSALYFCAVRGGSYKYIFGTGTRLKVLAN | (aa) |
| 5 | MASAPISMLAMLFTLSGLRAQSVAQPEDQVNVAEGNPLTVKCTYSVSGNPYLFWYVQYPNRGL | TCR A Vα + |
| | QFLLKYITGDNLVKGSYGFEAEFNKSQTSFHLKKPSALVSDSALYFCAVRGGSYKYIFGTGTR | ss (aa) |
| | LKVLAN | |
| 6 | MASAPISMLAMLFTLSGLRAQSVAQPEDQVNVAEGNPLTVKCTYSVSGNPYLFWYVQYPNRGL | TCR A Vα + |
| | QFLLKYITGDNLVKGSYGFEAEFNKSQTSFHLKKPSALVSDSALYFCAVRGGSYKYIFGTGTR | Cα (aa) |
| | LKVLANIQNPDPAVYQLRDSKSSDKSVCLFTDFDSQTNVSQSKDSDVYITDKTVLDMRSMDFK | |
| | SNSAVAWSNKSDFACANAFNNSIIPEDTFFPSPESSCDVKLVEKSFETDTNLNFQNLSVIGFR | |
| | ILLLKVAGFNLLMTLRLWSS | |
| 7 | ATGGCCTCTGCACCCATCTCGATGCTTGCGATGCTCTTCACATTGAGTGGGCTGAGAGCTCAG | TCR A Vα |
| | TCAGTGGCTCAGCCGGAAGATCAGGTCAACGTTGCTGAAGGGAATCCTCTGACTGTGAAATGC | (nt) |
| | ACCTATTCAGTCTCTGGAAACCCTTATCTTTTTTGGTATGTTCAATACCCCAACCGAGGCCTC | |
| | CAGTTCCTTCTGAAATACATCACAGGGGATAACCTGGTTAAAGGCAGCTATGGCTTTGAAGCT | |
| | GAATTTAACAAGAGCCAAACCTCCTTCCACCTGAAGAAACCATCTGCCCTTGTGAGCGACTCC | |
| | GCTTTGTACTTCTGTGCTGTGAGAGGGGGTTCCTACAAATACATCTTTGGAACAGGCACCAGG | |
| | CTGAAGGTTTTAGCAAAT | |
| 8 | ATGGCCTCTGCACCCATCTCGATGCTTGCGATGCTCTTCACATTGAGTGGGCTGAGAGCTCAG | TCR A Vα + |
| | TCAGTGGCTCAGCCGGAAGATCAGGTCAACGTTGCTGAAGGGAATCCTCTGACTGTGAAATGC | Cα (nt) |
| | ACCTATTCAGTCTCTGGAAACCCTTATCTTTTTTGGTATGTTCAATACCCCAACCGAGGCCTC | |
| | CAGTTCCTTCTGAAATACATCACAGGGGATAACCTGGTTAAAGGCAGCTATGGCTTTGAAGCT | |
| | GAATTTAACAAGAGCCAAACCTCCTTCCACCTGAAGAAACCATCTGCCCTTGTGAGCGACTCC | |
| | GCTTTGTACTTCTGTGCTGTGAGAGGGGGTTCCTACAAATACATCTTTGGAACAGGCACCAGG | |
| | CTGAAGGTTTTAGCAAATATCCAGAACCCTGACCCTGCCGTGTACCAGCTGAGAGACTCTAAA | |
| | TCCAGTGACAAGTCTGTCTGCCTATTCACCGATTTTGATTCTCAAACAAATGTGTCACAAAGT | |
| | AAGGATTCTGATGTGTATATCACAGACAAAACTGTGCTAGACATGAGGTCTATGGACTTCAAG | |
| | AGCAACAGTGCTGTGGCCTGGAGCAACAAATCTGACTTTGCATGTGCAAACGCCTTCAACAAC | |
| | AGCATTATTCCAGAAGACACCTTCTTCCCCAGCCCAGAAAGTTCCTGTGATGTCAAGCTGGTC | |
| | GAGAAAAGCTTTGAAACAGATACGAACCTAAACTTTCAAAACCTGTCAGTGATTGGGTTCCGA | |
| | ATCCTCCTCCTGAAAGTGGCCGGGTTTAATCTGCTCATGACGCTGCGGCTGTGGTCCAGC | |
| 9 | SEHNR | TCR A-T Vβ |
| | | CDR-1 |
| 10 | FQNEAQ | TCR A-T Vβ |
| | | CDR-2 |
| 11 | ASTPGTVYNEQF | TCR A Vβ |
| | | CDR-3 |
| 12 | DTGVSQDPRHKITKRGQNVTFRCDPISEHNRLYWYRQTLGQGPEFLTYFQNEAQLEKSRLLSD | TCR A Vβ |
| | RFSAERPKGSFSTLEIQRTEQGDSAMYLCASTPGTVYNEQFFGPGTRLTVLE | (aa) |
| 13 | MGTSLLCWMALCLLGADHADTGVSQDPRHKITKRGQNVTFRCDPISEHNRLYWYRQTLGQGPE | TCR A Vβ + |
| | FLTYFQNEAQLEKSRLLSDRFSAERPKGSFSTLEIQRTEQGDSAMYLCASTPGTVYNEQFFGP | ss (aa) |
| | GTRLTVLE | |
| 14 | MGTSLLCWMALCLLGADHADTGVSQDPRHKITKRGQNVTFRCDPISEHNRLYWYRQTLGQGPE | TCR A Vβ + |
| | FLTYFQNEAQLEKSRLLSDRFSAERPKGSFSTLEIQRTEQGDSAMYLCASTPGTVYNEQFFGP | Cβ (aa) |
| | GTRLTVLEDLKNVFPPEVAVFEPSEAEISHTQKATLVCLATGFYPDHVELSWWVNGKEVHSGV | |
| | STDPQPLKEQPALNDSRYCLSSRLRVSATFWQNPRNHFRCQVQFYGLSENDEWTQDRAKPVTQ | |
| | IVSAEAWGRADCGFTSESYQQGVLSATILYEILLGKATLYAVLVSALVLMAMVKRKDSRG | |
| 15 | ATGGGTACCAGCCTCCTCTGCTGGATGGCCCTGTGTCTCCTGGGGGCAGATCACGCAGATACT | TCR A Vβ |
| | GGAGTCTCCCAGGACCCCAGACACAAGATCACAAAGAGGGGACAGAATGTAACTTTCAGGTGT | (nt) |
| | GATCCAATTTCTGAACACAACCGCCTTTATTGGTACCGACAGACCCTGGGGCAGGGCCCAGAG | |
| | TTTCTGACTTACTTCCAGAATGAAGCTCAACTAGAAAAATCAAGGCTGCTCAGTGATCGGTTC | |
| | TCTGCAGAGAGGCCTAAGGGATCTTTCTCCACCTTGGAGATCCAGCGCACAGAGCAGGGGGAC | |
| | TCGGCCATGTATCTCTGTGCCAGCACCCCCGGGACGGTCTACAATGAGCAGTTCTTCGGGCCA | |
| | GGGACACGGCTCACCGTGCTAGAG | |
| 16 | ATGGGTACCAGCCTCCTCTGCTGGATGGCCCTGTGTCTCCTGGGGGCAGATCACGCAGATACT | TCR A Vβ + |
| | GGAGTCTCCCAGGACCCCAGACACAAGATCACAAAGAGGGGACAGAATGTAACTTTCAGGTGT | Cβ (nt) |
| | GATCCAATTTCTGAACACAACCGCCTTTATTGGTACCGACAGACCCTGGGGCAGGGCCCAGAG | |
| | TTTCTGACTTACTTCCAGAATGAAGCTCAACTAGAAAAATCAAGGCTGCTCAGTGATCGGTTC | |
| | TCTGCAGAGAGGCCTAAGGGATCTTTCTCCACCTTGGAGATCCAGCGCACAGAGCAGGGGGAC | |
| | TCGGCCATGTATCTCTGTGCCAGCACCCCCGGGACGGTCTACAATGAGCAGTTCTTCGGGCCA | |
| | GGGACACGGCTCACCGTGCTAGAGGACCTGAAAAACGTGTTCCCACCCGAGGTCGCTGTGTTT | |
| | GAGCCATCAGAAGCAGAGATCTCCCACACCCAAAAGGCCACACTGGTATGCCTGGCCACAGGC | |
| | TTCTACCCCGACCACGTGGAGCTGAGCTGGTGGGTGAATGGGAAGGAGGTGCACAGTGGGGTC | |
| | AGCACAGACCCGCAGCCCCTCAAGGAGCAGCCCGCCCTCAATGACTCCAGATACTGCCTGAGC | |
| | AGCCGCCTGAGGGTCTCGGCCACCTTCTGGCAGAACCCCCGCAACCACTTCCGCTGTCAAGTC | |
| | CAGTTCTACGGGCTCTCGGAGAATGACGAGTGGACCCAGGATAGGGCCAAACCTGTCACCCAG | |
| | ATCGTCAGCGCCGAGGCCTGGGGTAGAGCAGACTGTGGCTTCACCTCCGAGTCTTACCAGCAA | |
| | GGGGTCCTGTCTGCCACCATCCTCTATGAGATCTTGCTAGGGAAGGCCACCTTGTATGCCGTG | |
| | CTGGTCAGTGCCCTCGTGCTGATGGCCATGGTCAAGAGAAAGGATTCCAGAGGCTAG | |
| 17 | ATGGCCTCTGCACCCATCTCGATGCTTGCGATGCTCTTCACATTGAGTGGGCTGAGAGCTCAG | TCR A full |
| | TCAGTGGCTCAGCCGGAAGATCAGGTCAACGTTGCTGAAGGGAATCCTCTGACTGTGAAATGC | construct nt |
| | ACCTATTCAGTCTCTGGAAACCCTTATCTTTTTTGGTATGTTCAATACCCCAACCGAGGCCTC | |
| | CAGTTCCTTCTGAAATACATCACAGGGGATAACCTGGTTAAAGGCAGCTATGGCTTTGAAGCT | |
| | GAATTTAACAAGAGCCAAACCTCCTTCCACCTGAAGAAACCATCTGCCCTTGTGAGCGACTCC | |
| | GCTTTGTACTTCTGTGCTGTGAGAGGGGGTTCCTACAAATACATCTTTGGAACAGGCACCAGG | |
| | CTGAAGGTTTTAGCAAATATCCAGAACCCTGACCCTGCCGTGTACCAGCTGAGAGACTCTAAA | |
| | TCCAGTGACAAGTCTGTCTGCCTATTCACCGATTTTGATTCTCAAACAAATGTGTCACAAAGT | |
| | AAGGATTCTGATGTGTATATCACAGACAAAACTGTGCTAGACATGAGGTCTATGGACTTCAAG | |
| | AGCAACAGTGCTGTGGCCTGGAGCAACAAATCTGACTTTGCATGTGCAAACGCCTTCAACAAC | |
| | AGCATTATTCCAGAAGACACCTTCTTCCCCAGCCCAGAAAGTTCCTGTGATGTCAAGCTGGTC | |
| | GAGAAAAGCTTTGAAACAGATACGAACCTAAACTTTCAAAACCTGTCAGTGATTGGGTTCCGA | |
| | ATCCTCCTCCTGAAAGTGGCCGGGTTTAATCTGCTCATGACGCTGCGGCTGTGGTCCAGCGGC | |
| | TCCGGAGCCACGAACTTCTCTCTGTTAAAGCAAGCAGGAGACGTGGAAGAAAACCCCGGTCCC | |
| | ATGGGTACCAGCCTCCTCTGCTGGATGGCCCTGTGTCTCCTGGGGGCAGATCACGCAGATACT | |
| | GGAGTCTCCCAGGACCCCAGACACAAGATCACAAAGAGGGGACAGAATGTAACTTTCAGGTGT | |
| | GATCCAATTTCTGAACACAACCGCCTTTATTGGTACCGACAGACCCTGGGGCAGGGCCCAGAG | |
| | TTTCTGACTTACTTCCAGAATGAAGCTCAACTAGAAAAATCAAGGCTGCTCAGTGATCGGTTC | |
| | TCTGCAGAGAGGCCTAAGGGATCTTTCTCCACCTTGGAGATCCAGCGCACAGAGCAGGGGGAC | |
| | TCGGCCATGTATCTCTGTGCCAGCACCCCCGGGACGGTCTACAATGAGCAGTTCTTCGGGCCA | |
| | GGGACACGGCTCACCGTGCTAGAGGACCTGAAAAACGTGTTCCCACCCGAGGTCGCTGTGTTT | |
| | GAGCCATCAGAAGCAGAGATCTCCCACACCCAAAAGGCCACACTGGTATGCCTGGCCACAGGC | |
| | TTCTACCCCGACCACGTGGAGCTGAGCTGGTGGGTGAATGGGAAGGAGGTGCACAGTGGGGTC | |
| | AGCACAGACCCGCAGCCCCTCAAGGAGCAGCCCGCCCTCAATGACTCCAGATACTGCCTGAGC | |
| | AGCCGCCTGAGGGTCTCGGCCACCTTCTGGCAGAACCCCCGCAACCACTTCCGCTGTCAAGTC | |
| | CAGTTCTACGGGCTCTCGGAGAATGACGAGTGGACCCAGGATAGGGCCAAACCTGTCACCCAG | |
| | ATCGTCAGCGCCGAGGCCTGGGGTAGAGCAGACTGTGGCTTCACCTCCGAGTCTTACCAGCAA | |
| | GGGGTCCTGTCTGCCACCATCCTCTATGAGATCTTGCTAGGGAAGGCCACCTTGTATGCCGTG | |
| | CTGGTCAGTGCCCTCGTGCTGATGGCCATGGTCAAGAGAAAGGATTCCAGAGGCTAG | |
| 18 | MASAPISMLAMLFTLSGLRAQSVAQPEDQVNVAEGNPLTVKCTYSVSGNPYLFWYVQYPNRGL | TCR A full |
| | QFLLKYITGDNLVKGSYGFEAEFNKSQTSFHLKKPSALVSDSALYFCAVRGGSYKYIFGTGTR | construct aa |
| | LKVLANIQNPDPAVYQLRDSKSSDKSVCLFTDFDSQTNVSQSKDSDVYITDKTVLDMRSMDFK | |
| | SNSAVAWSNKSDFACANAFNNSIIPEDTFFPSPESSCDVKLVEKSFETDTNLNFQNLSVIGFR | |
| | ILLLKVAGFNLLMTLRLWSSGSGATNFSLLKQAGDVEENPGPMGTSLLCWMALCLLGADHADT | |
| | GVSQDPRHKITKRGQNVTFRCDPISEHNRLYWYRQTLGQGPEFLTYFQNEAQLEKSRLLSDRF | |
| | SAERPKGSFSTLEIQRTEQGDSAMYLCASTPGTVYNEQFFGPGTRLTVLEDLKNVFPPEVAVF | |
| | EPSEAEISHTQKATLVCLATGFYPDHVELSWWVNGKEVHSGVSTDPQPLKEQPALNDSRYCLS | |
| | SRLRVSATFWQNPRNHFRCQVQFYGLSENDEWTQDRAKPVTQIVSAEAWGRADCGFTSESYQQ | |
| | GVLSATILYEILLGKATLYAVLVSALVLMAMVKRKDSRG | |
| 19 | TSINN | TCR B, G, R, |
| | | T Vα CDR-1 |
| 20 | IRSNERE | TCR B, G, R, |
| | | T Vα CDR-2 |
| 21 | ATAPGSGTYKYI | TCR B Vα |
| | | CDR-3 |
| 22 | SQQGEEDPQALSIQEGENATMNCSYKTSINNLQWYRQNSGRGLVHLILIRSNEREKHSGRLRV | TCR B Vα |
| | TLDTSKKSSSLLITASRAADTASYFCATAPGSGTYKYIFGTGTRLKVLAN | (aa) |
| 23 | METLLGVSLVILWLQLARVNSQQGEEDPQALSIQEGENATMNCSYKTSINNLQWYRQNSGRGL | TCR B Vα + |
| | VHLILIRSNEREKHSGRLRVTLDTSKKSSSLLITASRAADTASYFCATAPGSGTYKYIFGTGT | ss (aa) |
| | RLKVLAN | |
| 24 | METLLGVSLVILWLQLARVNSQQGEEDPQALSIQEGENATMNCSYKTSINNLQWYRQNSGRGL | TCR B Vα + |
| | VHLILIRSNEREKHSGRLRVTLDTSKKSSSLLITASRAADTASYFCATAPGSGTYKYIFGTGT | Cα (aa) |
| | RLKVLANIQNPDPAVYQLRDSKSSDKSVCLFTDFDSQTNVSQSKDSDVYITDKTVLDMRSMDF | |
| | KSNSAVAWSNKSDFACANAFNNSIIPEDTFFPSPESSCDVKLVEKSFETDTNLNFQNLSVIGF | |
| | RILLLKVAGFNLLMTLRLWSS | |
| 25 | ATGGAAACTCTCCTGGGAGTGTCTTTGGTGATTCTATGGCTTCAACTGGCTAGGGTGAACAGT | TCR B Vα |
| | CAACAGGGAGAAGAGGATCCTCAGGCCTTGAGCATCCAGGAGGGTGAAAATGCCACCATGAAC | (nt) |
| | TGCAGTTACAAAACTAGTATAAACAATTTACAGTGGTATAGACAAAATTCAGGTAGAGGCCTT | |
| | GTCCACCTAATTTTAATACGTTCAAATGAAAGAGAGAAACACAGTGGAAGATTAAGAGTCACG | |
| | CTTGACACTTCCAAGAAAAGCAGTTCCTTGTTGATCACGGCTTCCCGGGCAGCAGACACTGCT | |
| | TCTTACTTCTGTGCTACGGCCCCTGGCTCAGGAACCTACAAATACATCTTTGGAACAGGCACC | |
| | AGGCTGAAGGTTTTAGCAAAT | |
| 26 | ATGGAAACTCTCCTGGGAGTGTCTTTGGTGATTCTATGGCTTCAACTGGCTAGGGTGAACAGT | TCR B Vα + |
| | CAACAGGGAGAAGAGGATCCTCAGGCCTTGAGCATCCAGGAGGGTGAAAATGCCACCATGAAC | Cα (nt) |
| | TGCAGTTACAAAACTAGTATAAACAATTTACAGTGGTATAGACAAAATTCAGGTAGAGGCCTT | |
| | GTCCACCTAATTTTAATACGTTCAAATGAAAGAGAGAAACACAGTGGAAGATTAAGAGTCACG | |
| | CTTGACACTTCCAAGAAAAGCAGTTCCTTGTTGATCACGGCTTCCCGGGCAGCAGACACTGCT | |
| | TCTTACTTCTGTGCTACGGCCCCTGGCTCAGGAACCTACAAATACATCTTTGGAACAGGCACC | |
| | AGGCTGAAGGTTTTAGCAAATATCCAGAACCCTGACCCTGCCGTGTACCAGCTGAGAGACTCT | |
| | AAATCCAGTGACAAGTCTGTCTGCCTATTCACCGATTTTGATTCTCAAACAAATGTGTCACAA | |
| | AGTAAGGATTCTGATGTGTATATCACAGACAAAACTGTGCTAGACATGAGGTCTATGGACTTC | |
| | AAGAGCAACAGTGCTGTGGCCTGGAGCAACAAATCTGACTTTGCATGTGCAAACGCCTTCAAC | |
| | AACAGCATTATTCCAGAAGACACCTTCTTCCCCAGCCCAGAAAGTTCCTGTGATGTCAAGCTG | |
| | GTCGAGAAAAGCTTTGAAACAGATACGAACCTAAACTTTCAAAACCTGTCAGTGATTGGGTTC | |
| | CGAATCCTCCTCCTGAAAGTGGCCGGGTTTAATCTGCTCATGACGCTGCGGCTGTGGTCCAGC | |
| 27 | AAPPDTYNSPLH | TCR B Vβ |
| | | CDR-3 |
| 28 | DTGVSQDPRHKITKRGQNVTFRCDPISEHNRLYWYRQTLGQGPEFLTYFQNEAQLEKSRLLSD | TCR B Vβ |
| | RFSAERPKGSFSTLEIQRTEQGDSAMYLCAAPPDTYNSPLHFGNGTRLTVTE | (aa) |
| 29 | MGTSLLCWMALCLLGADHADTGVSQDPRHKITKRGQNVTFRCDPISEHNRLYWYRQTLGQGPE | TCR B Vβ + |
| | FLTYFQNEAQLEKSRLLSDRFSAERPKGSFSTLEIQRTEQGDSAMYLCAAPPDTYNSPLHFGN | ss (aa) |
| | GTRLTVTE | |
| 30 | MGTSLLCWMALCLLGADHADTGVSQDPRHKITKRGQNVTFRCDPISEHNRLYWYRQTLGQGPE | TCR B Vβ + |
| | FLTYFQNEAQLEKSRLLSDRFSAERPKGSFSTLEIQRTEQGDSAMYLCAAPPDTYNSPLHFGN | Cβ (aa) |
| | GTRLTVTEDLNKVEPPEVAVFEPSEAEISHTQKATLVCLATGFFPDHVELSWWVNGKEVHSGV | |
| | STDPQPLKEQPALNDSRYCLSSRLRVSATFWQNPRNHERCQVQFYGLSENDEWTQDRAKPVTQ | |
| | IVSAEAWGRADCGFTSVSYQQGVLSATILYEILLGKATLYAVLVSALVLMAMVKRKDF | |
| 31 | ATGGGTACCAGCCTCCTCTGCTGGATGGCCCTGTGTCTCCTGGGGGCAGATCACGCAGATACT | TCR B Vβ |
| | GGAGTCTCCCAGGACCCCAGACACAAGATCACAAAGAGGGGACAGAATGTAACTTTCAGGTGT | (nt) |
| | GATCCAATTTCTGAACACAACCGCCTTTATTGGTACCGACAGACCCTGGGGCAGGGCCCAGAG | |
| | TTTCTGACTTACTTCCAGAATGAAGCTCAACTAGAAAAATCAAGGCTGCTCAGTGATCGGTTC | |
| | TCTGCAGAGAGGCCTAAGGGATCTTTCTCCACCTTGGAGATCCAGCGCACAGAGCAGGGGGAC | |
| | TCGGCCATGTATCTCTGTGCCGCCCCCCCGGACACCTATAATTCACCCCTCCACTTTGGGAAT | |
| | GGGACCAGGCTCACTGTGACAGAG | |
| 32 | ATGGGTACCAGCCTCCTCTGCTGGATGGCCCTGTGTCTCCTGGGGGCAGATCACGCAGATACT | TCR B Vβ + |
| | GGAGTCTCCCAGGACCCCAGACACAAGATCACAAAGAGGGGACAGAATGTAACTTTCAGGTGT | Cβ (nt) |
| | GATCCAATTTCTGAACACAACCGCCTTTATTGGTACCGACAGACCCTGGGGCAGGGCCCAGAG | |
| | TTTCTGACTTACTTCCAGAATGAAGCTCAACTAGAAAAATCAAGGCTGCTCAGTGATCGGTTC | |
| | TCTGCAGAGAGGCCTAAGGGATCTTTCTCCACCTTGGAGATCCAGCGCACAGAGCAGGGGGAC | |
| | TCGGCCATGTATCTCTGTGCCGCCCCCCCGGACACCTATAATTCACCCCTCCACTTTGGGAAT | |
| | GGGACCAGGCTCACTGTGACAGAGGACCTGAACAAGGTGTTCCCACCCGAGGTCGCTGTGTTT | |
| | GAGCCATCAGAAGCAGAGATCTCCCACACCCAAAAGGCCACACTGGTGTGCCTGGCCACAGGC | |
| | TTCTTCCCCGACCACGTGGAGCTGAGCTGGTGGGTGAATGGGAAGGAGGTGCACAGTGGGGTC | |
| | AGCACAGACCCGCAGCCCCTCAAGGAGCAGCCCGCCCTCAATGACTCCAGATACTGCCTGAGC | |
| | AGCCGCCTGAGGGTCTCGGCCACCTTCTGGCAGAACCCCCGCAACCACTTCCGCTGTCAAGTC | |
| | CAGTTCTACGGGCTCTCGGAGAATGACGAGTGGACCCAGGATAGGGCCAAACCCGTCACCCAG | |
| | ATCGTCAGCGCCGAGGCCTGGGGTAGAGCAGACTGTGGCTTTACCTCGGTGTCCTACCAGCAA | |
| | GGGGTCCTGTCTGCCACCATCCTCTATGAGATCCTGCTAGGGAAGGCCACCCTGTATGCTGTG | |
| | CTGGTCAGCGCCCTTGTGTTGATGGCCATGGTCAAGAGAAAGGATTTCTGA | |
| 33 | ATGGAAACTCTCCTGGGAGTGTCTTTGGTGATTCTATGGCTTCAACTGGCTAGGGTGAACAGT | TCR B full |
| | CAACAGGGAGAAGAGGATCCTCAGGCCTTGAGCATCCAGGAGGGTGAAAATGCCACCATGAAC | construct nt |
| | TGCAGTTACAAAACTAGTATAAACAATTTACAGTGGTATAGACAAAATTCAGGTAGAGGCCTT | |
| | GTCCACCTAATTTTAATACGTTCAAATGAAAGAGAGAAACACAGTGGAAGATTAAGAGTCACG | |
| | CTTGACACTTCCAAGAAAAGCAGTTCCTTGTTGATCACGGCTTCCCGGGCAGCAGACACTGCT | |
| | TCTTACTTCTGTGCTACGGCCCCTGGCTCAGGAACCTACAAATACATCTTTGGAACAGGCACC | |
| | AGGCTGAAGGTTTTAGCAAATATCCAGAACCCTGACCCTGCCGTGTACCAGCTGAGAGACTCT | |
| | AAATCCAGTGACAAGTCTGTCTGCCTATTCACCGATTTTGATTCTCAAACAAATGTGTCACAA | |
| | AGTAAGGATTCTGATGTGTATATCACAGACAAAACTGTGCTAGACATGAGGTCTATGGACTTC | |
| | AAGAGCAACAGTGCTGTGGCCTGGAGCAACAAATCTGACTTTGCATGTGCAAACGCCTTCAAC | |
| | AACAGCATTATTCCAGAAGACACCTTCTTCCCCAGCCCAGAAAGTTCCTGTGATGTCAAGCTG | |
| | GTCGAGAAAAGCTTTGAAACAGATACGAACCTAAACTTTCAAAACCTGTCAGTGATTGGGTTC | |
| | CGAATCCTCCTCCTGAAAGTGGCCGGGTTTAATCTGCTCATGACGCTGCGGCTGTGGTCCAGC | |
| | GGCTCCGGAGCCACGAACTTCTCTCTGTTAAAGCAAGCAGGAGACGTGGAAGAAAACCCCGGT | |
| | CCCATGGGTACCAGCCTCCTCTGCTGGATGGCCCTGTGTCTCCTGGGGGCAGATCACGCAGAT | |
| | ACTGGAGTCTCCCAGGACCCCAGACACAAGATCACAAAGAGGGGACAGAATGTAACTTTCAGG | |
| | TGTGATCCAATTTCTGAACACAACCGCCTTTATTGGTACCGACAGACCCTGGGGCAGGGCCCA | |
| | GAGTTTCTGACTTACTTCCAGAATGAAGCTCAACTAGAAAAATCAAGGCTGCTCAGTGATCGG | |
| | TTCTCTGCAGAGAGGCCTAAGGGATCTTTCTCCACCTTGGAGATCCAGCGCACAGAGCAGGGG | |
| | GACTCGGCCATGTATCTCTGTGCCGCCCCCCCGGACACCTATAATTCACCCCTCCACTTTGGG | |
| | AATGGGACCAGGCTCACTGTGACAGAGGACCTGAACAAGGTGTTCCCACCCGAGGTCGCTGTG | |
| | TTTGAGCCATCAGAAGCAGAGATCTCCCACACCCAAAAGGCCACACTGGTGTGCCTGGCCACA | |
| | GGCTTCTTCCCCGACCACGTGGAGCTGAGCTGGTGGGTGAATGGGAAGGAGGTGCACAGTGGG | |
| | GTCAGCACAGACCCGCAGCCCCTCAAGGAGCAGCCCGCCCTCAATGACTCCAGATACTGCCTG | |
| | AGCAGCCGCCTGAGGGTCTCGGCCACCTTCTGGCAGAACCCCCGCAACCACTTCCGCTGTCAA | |
| | GTCCAGTTCTACGGGCTCTCGGAGAATGACGAGTGGACCCAGGATAGGGCCAAACCCGTCACC | |
| | CAGATCGTCAGCGCCGAGGCCTGGGGTAGAGCAGACTGTGGCTTTACCTCGGTGTCCTACCAG | |
| | CAAGGGGTCCTGTCTGCCACCATCCTCTATGAGATCCTGCTAGGGAAGGCCACCCTGTATGCT | |
| | GTGCTGGTCAGCGCCCTTGTGTTGATGGCCATGGTCAAGAGAAAGGATTTCTGA | |
| 34 | METLLGVSLVILWLQLARVNSQQGEEDPQALSIQEGENATMNCSYKTSINNLQWYRQNSGRGL | TCR B full |
| | VHLILIRSNEREKHSGRLRVTLDTSKKSSSLLITASRAADTASYFCATAPGSGTYKYIFGTGT | construct aa |
| | RLKVLANIQNPDPAVYQLRDSKSSDKSVCLFTDFDSQTNVSQSKDSDVYITDKTVLDMRSMDF | |
| | KSNSAVAWSNKSDFACANAFNNSIIPEDTFFPSPESSCDVKLVEKSFETDTNLNFQNLSVIGF | |
| | RILLLKVAGFNLLMTLRLWSSGSGATNFSLLKQAGDVEENPGPMGTSLLCWMALCLLGADHAD | |
| | TGVSQDPRHKITKRGQNVTFRCDPISEHNRLYWYRQTLGQGPEFLTYFQNEAQLEKSRLLSDR | |
| | FSAERPKGSFSTLEIQRTEQGDSAMYLCAAPPDTYNSPLHFGNGTRLTVTEDLNKVEPPEVAV | |
| | FEPSEAEISHTQKATLVCLATGFFPDHVELSWWVNGKEVHSGVSTDPQPLKEQPALNDSRYCL | |
| | SSRLRVSATFWQNPRNHFRCQVQFYGLSENDEWTQDRAKPVTQIVSAEAWGRADCGFTSVSYQ | |
| | QGVLSATILYEILLGKATLYAVLVSALVLMAMVKRKDF* | |
| 35 | DSAIYN | TCR C, I, L, |
| | | M Vα CDR-1 |
| 36 | IQSSQRE | TCR C, I, L, |
| | | M Vα CDR-2 |
| 37 | AVRPRTSGTYKYI | TCR C Vα |
| | | CDR-3 |
| 38 | KQEVTQIPAALSVPEGENLVLNCSFTDSAIYNLQWFRQDPGKGLTSLLLIQSSQREQTSGRLN | TCR C Vα |
| | ASLDKSSGRSTLYIAASQPGDSATYLCAVRPRTSGTYKYIFGTGTRLKVLAN | (aa) |
| 39 | METLLGLLILWLQLQWVSSKQEVTQIPAALSVPEGENLVLNCSFTDSAIYNLQWFRQDPGKGL | TCR C Vα + |
| | TSLLLIQSSQREQTSGRLNASLDKSSGRSTLYIAASQPGDSATYLCAVRPRTSGTYKYIFGTG | ss (aa) |
| | TRLKVLAN | |
| 40 | METLLGLLILWLQLQWVSSKQEVTQIPAALSVPEGENLVLNCSFTDSAIYNLQWFRQDPGKGL | TCR C Vα + |
| | TSLLLIQSSQREQTSGRLNASLDKSSGRSTLYIAASQPGDSATYLCAVRPRTSGTYKYIFGTG | Cα (aa) |
| | TRLKVLANIQNPDPAVYQLRDSKSSDKSVCLFTDFDSQTNVSQSKDSDVYITDKTVLDMRSMD | |
| | FKSNSAVAWSNKSDFACANAFNNSIIPEDTFFPSPESSCDVKLVEKSFETDTNLNFQNLSVIG | |
| | FRILLLKVAGFNLLMTLRLWSS | |
| 41 | ATGGAGACCCTCTTGGGCCTGCTTATCCTTTGGCTGCAGCTGCAATGGGTGAGCAGCAAACAG | TCR C Vα |
| | GAGGTGACGCAGATTCCTGCAGCTCTGAGTGTCCCAGAAGGAGAAAACTTGGTTCTCAACTGC | (nt) |
| | AGTTTCACTGATAGCGCTATTTACAACCTCCAGTGGTTTAGGCAGGACCCTGGGAAAGGTCTC | |
| | ACATCTCTGTTGCTTATTCAGTCAAGTCAGAGAGAGCAAACAAGTGGAAGACTTAATGCCTCG | |
| | CTGGATAAATCATCAGGACGTAGTACTTTATACATTGCAGCTTCTCAGCCTGGTGACTCAGCC | |
| | ACCTACCTCTGTGCTGTGAGGCCTCGGACCTCAGGAACCTACAAATACATCTTTGGAACAGGC | |
| | ACCAGGCTGAAGGTTTTAGCAAAT | |
| 42 | ATGGAGACCCTCTTGGGCCTGCTTATCCTTTGGCTGCAGCTGCAATGGGTGAGCAGCAAACAG | TCR C Vα + |
| | GAGGTGACGCAGATTCCTGCAGCTCTGAGTGTCCCAGAAGGAGAAAACTTGGTTCTCAACTGC | Cα (nt) |
| | AGTTTCACTGATAGCGCTATTTACAACCTCCAGTGGTTTAGGCAGGACCCTGGGAAAGGTCTC | |
| | ACATCTCTGTTGCTTATTCAGTCAAGTCAGAGAGAGCAAACAAGTGGAAGACTTAATGCCTCG | |
| | CTGGATAAATCATCAGGACGTAGTACTTTATACATTGCAGCTTCTCAGCCTGGTGACTCAGCC | |
| | ACCTACCTCTGTGCTGTGAGGCCTCGGACCTCAGGAACCTACAAATACATCTTTGGAACAGGC | |
| | ACCAGGCTGAAGGTTTTAGCAAATATCCAGAACCCTGACCCTGCCGTGTACCAGCTGAGAGAC | |
| | TCTAAATCCAGTGACAAGTCTGTCTGCCTATTCACCGATTTTGATTCTCAAACAAATGTGTCA | |
| | CAAAGTAAGGATTCTGATGTGTATATCACAGACAAAACTGTGCTAGACATGAGGTCTATGGAC | |
| | TTCAAGAGCAACAGTGCTGTGGCCTGGAGCAACAAATCTGACTTTGCATGTGCAAACGCCTTC | |
| | AACAACAGCATTATTCCAGAAGACACCTTCTTCCCCAGCCCAGAAAGTTCCTGTGATGTCAAG | |
| | CTGGTCGAGAAAAGCTTTGAAACAGATACGAACCTAAACTTTCAAAACCTGTCAGTGATTGGG | |
| | TTCCGAATCCTCCTCCTGAAAGTGGCCGGGTTTAATCTGCTCATGACGCTGCGGCTGTGGTCC | |
| | AGC | |
| 43 | ASTELSGNTIY | TCR C Vβ |
| | | CDR-3 |
| 44 | DTGVSQDPRHKITKRGQNVTFRCDPISEHNRLYWYRQTLGQGPEFLTYFQNEAQLEKSRLLSD | TCR C Vβ |
| | RFSAERPKGSFSTLEIQRTEQGDSAMYLCASTELSGNTIYFGEGSWLTVVE | (aa) |
| 45 | MGTSLLCWMALCLLGADHADTGVSQDPRHKITKRGQNVTFRCDPISEHNRLYWYRQTLGQGPE | TCR C Vβ + |
| | FLTYFQNEAQLEKSRLLSDRFSAERPKGSFSTLEIQRTEQGDSAMYLCASTELSGNTIYFGEG | ss (aa) |
| | SWLTVVE | |
| 46 | MGTSLLCWMALCLLGADHADTGVSQDPRHKITKRGQNVTFRCDPISEHNRLYWYRQTLGQGPE | TCR C Vβ + |
| | FLTYFQNEAQLEKSRLLSDRFSAERPKGSFSTLEIQRTEQGDSAMYLCASTELSGNTIYFGEG | Cβ (aa) |
| | SWLTVVEDLNKVFPPEVAVFEPSEAEISHTQKATLVCLATGFFPDHVELSWWVNGKEVHSGVS | |
| | TDPQPLKEQPALNDSRYCLSSRLRVSATFWQNPRNHFRCQVQFYGLSENDEWTQDRAKPVTQI | |
| | VSAEAWGRADCGFTSVSYQQGVLSATILYEILLGKATLYAVLVSALVLMAMVKRKDF | |
| 47 | ATGGGTACCAGCCTCCTCTGCTGGATGGCCCTGTGTCTCCTGGGGGCAGATCACGCAGATACT | TCR C Vβ |
| | GGAGTCTCCCAGGACCCCAGACACAAGATCACAAAGAGGGGACAGAATGTAACTTTCAGGTGT | (nt) |
| | GATCCAATTTCTGAACACAACCGCCTTTATTGGTACCGACAGACCCTGGGGCAGGGCCCAGAG | |
| | TTTCTGACTTACTTCCAGAATGAAGCTCAACTAGAAAAATCAAGGCTGCTCAGTGATCGGTTC | |
| | TCTGCAGAGAGGCCTAAGGGATCTTTCTCCACCTTGGAGATCCAGCGCACAGAGCAGGGGGAC | |
| | TCGGCCATGTATCTCTGTGCCAGCACAGAACTCTCTGGAAACACCATATATTTTGGAGAGGGA | |
| | AGTTGGCTCACTGTTGTAGAG | |
| 48 | ATGGGTACCAGCCTCCTCTGCTGGATGGCCCTGTGTCTCCTGGGGGCAGATCACGCAGATACT | TCR C Vβ + |
| | GGAGTCTCCCAGGACCCCAGACACAAGATCACAAAGAGGGGACAGAATGTAACTTTCAGGTGT | Cβ (nt) |
| | GATCCAATTTCTGAACACAACCGCCTTTATTGGTACCGACAGACCCTGGGGCAGGGCCCAGAG | |
| | TTTCTGACTTACTTCCAGAATGAAGCTCAACTAGAAAAATCAAGGCTGCTCAGTGATCGGTTC | |
| | TCTGCAGAGAGGCCTAAGGGATCTTTCTCCACCTTGGAGATCCAGCGCACAGAGCAGGGGGAC | |
| | TCGGCCATGTATCTCTGTGCCAGCACAGAACTCTCTGGAAACACCATATATTTTGGAGAGGGA | |
| | AGTTGGCTCACTGTTGTAGAGGACCTGAACAAGGTGTTCCCACCCGAGGTCGCTGTGTTTGAG | |
| | CCATCAGAAGCAGAGATCTCCCACACCCAAAAGGCCACACTGGTGTGCCTGGCCACAGGCTTC | |
| | TTCCCCGACCACGTGGAGCTGAGCTGGTGGGTGAATGGGAAGGAGGTGCACAGTGGGGTCAGC | |
| | ACAGACCCGCAGCCCCTCAAGGAGCAGCCCGCCCTCAATGACTCCAGATACTGCCTGAGCAGC | |
| | CGCCTGAGGGTCTCGGCCACCTTCTGGCAGAACCCCCGCAACCACTTCCGCTGTCAAGTCCAG | |
| | TTCTACGGGCTCTCGGAGAATGACGAGTGGACCCAGGATAGGGCCAAACCCGTCACCCAGATC | |
| | GTCAGCGCCGAGGCCTGGGGTAGAGCAGACTGTGGCTTTACCTCGGTGTCCTACCAGCAAGGG | |
| | GTCCTGTCTGCCACCATCCTCTATGAGATCCTGCTAGGGAAGGCCACCCTGTATGCTGTGCTG | |
| | GTCAGCGCCCTTGTGTTGATGGCCATGGTCAAGAGAAAGGATTTCTGA | |
| 49 | ATGGAGACCCTCTTGGGCCTGCTTATCCTTTGGCTGCAGCTGCAATGGGTGAGCAGCAAACAG | TCR C full |
| | GAGGTGACGCAGATTCCTGCAGCTCTGAGTGTCCCAGAAGGAGAAAACTTGGTTCTCAACTGC | construct nt |
| | AGTTTCACTGATAGCGCTATTTACAACCTCCAGTGGTTTAGGCAGGACCCTGGGAAAGGTCTC | |
| | ACATCTCTGTTGCTTATTCAGTCAAGTCAGAGAGAGCAAACAAGTGGAAGACTTAATGCCTCG | |
| | CTGGATAAATCATCAGGACGTAGTACTTTATACATTGCAGCTTCTCAGCCTGGTGACTCAGCC | |
| | ACCTACCTCTGTGCTGTGAGGCCTCGGACCTCAGGAACCTACAAATACATCTTTGGAACAGGC | |
| | ACCAGGCTGAAGGTTTTAGCAAATATCCAGAACCCTGACCCTGCCGTGTACCAGCTGAGAGAC | |
| | TCTAAATCCAGTGACAAGTCTGTCTGCCTATTCACCGATTTTGATTCTCAAACAAATGTGTCA | |
| | CAAAGTAAGGATTCTGATGTGTATATCACAGACAAAACTGTGCTAGACATGAGGTCTATGGAC | |
| | TTCAAGAGCAACAGTGCTGTGGCCTGGAGCAACAAATCTGACTTTGCATGTGCAAACGCCTTC | |
| | AACAACAGCATTATTCCAGAAGACACCTTCTTCCCCAGCCCAGAAAGTTCCTGTGATGTCAAG | |
| | CTGGTCGAGAAAAGCTTTGAAACAGATACGAACCTAAACTTTCAAAACCTGTCAGTGATTGGG | |
| | TTCCGAATCCTCCTCCTGAAAGTGGCCGGGTTTAATCTGCTCATGACGCTGCGGCTGTGGTCC | |
| | AGCGGCTCCGGAGCCACGAACTTCTCTCTGTTAAAGCAAGCAGGAGACGTGGAAGAAAACCCC | |
| | GGTCCCATGGGTACCAGCCTCCTCTGCTGGATGGCCCTGTGTCTCCTGGGGGCAGATCACGCA | |
| | GATACTGGAGTCTCCCAGGACCCCAGACACAAGATCACAAAGAGGGGACAGAATGTAACTTTC | |
| | AGGTGTGATCCAATTTCTGAACACAACCGCCTTTATTGGTACCGACAGACCCTGGGGCAGGGC | |
| | CCAGAGTTTCTGACTTACTTCCAGAATGAAGCTCAACTAGAAAAATCAAGGCTGCTCAGTGAT | |
| | CGGTTCTCTGCAGAGAGGCCTAAGGGATCTTTCTCCACCTTGGAGATCCAGCGCACAGAGCAG | |
| | GGGGACTCGGCCATGTATCTCTGTGCCAGCACAGAACTCTCTGGAAACACCATATATTTTGGA | |
| | GAGGGAAGTTGGCTCACTGTTGTAGAGGACCTGAACAAGGTGTTCCCACCCGAGGTCGCTGTG | |
| | TTTGAGCCATCAGAAGCAGAGATCTCCCACACCCAAAAGGCCACACTGGTGTGCCTGGCCACA | |
| | GGCTTCTTCCCCGACCACGTGGAGCTGAGCTGGTGGGTGAATGGGAAGGAGGTGCACAGTGGG | |
| | GTCAGCACAGACCCGCAGCCCCTCAAGGAGCAGCCCGCCCTCAATGACTCCAGATACTGCCTG | |
| | AGCAGCCGCCTGAGGGTCTCGGCCACCTTCTGGCAGAACCCCCGCAACCACTTCCGCTGTCAA | |
| | GTCCAGTTCTACGGGCTCTCGGAGAATGACGAGTGGACCCAGGATAGGGCCAAACCCGTCACC | |
| | CAGATCGTCAGCGCCGAGGCCTGGGGTAGAGCAGACTGTGGCTTTACCTCGGTGTCCTACCAG | |
| | CAAGGGGTCCTGTCTGCCACCATCCTCTATGAGATCCTGCTAGGGAAGGCCACCCTGTATGCT | |
| | GTGCTGGTCAGCGCCCTTGTGTTGATGGCCATGGTCAAGAGAAAGGATTTCTGA | |
| 50 | METLLGLLILWLQLQWVSSKQEVTQIPAALSVPEGENLVLNCSFTDSAIYNLQWFRQDPGKGL | TCR C full |
| | TSLLLIQSSQREQTSGRLNASLDKSSGRSTLYIAASQPGDSATYLCAVRPRTSGTYKYIFGTG | construct aa |
| | TRLKVLANIQNPDPAVYQLRDSKSSDKSVCLFTDFDSQTNVSQSKDSDVYITDKTVLDMRSMD | |
| | FKSNSAVAWSNKSDFACANAFNNSIIPEDTFFPSPESSCDVKLVEKSFETDTNLNFQNLSVIG | |
| | FRILLLKVAGFNLLMTLRLWSSGSGATNFSLLKQAGDVEENPGPMGTSLLCWMALCLLGADHA | |
| | DTGVSQDPRHKITKRGQNVTFRCDPISEHNRLYWYRQTLGQGPEFLTYFQNEAQLEKSRLLSD | |
| | RFSAERPKGSFSTLEIQRTEQGDSAMYLCASTELSGNTIYFGEGSWLTVVEDLNKVFPPEVAV | |
| | FEPSEAEISHTQKATLVCLATGFFPDHVELSWWVNGKEVHSGVSTDPQPLKEQPALNDSRYCL | |
| | SSRLRVSATFWQNPRNHFRCQVQFYGLSENDEWTQDRAKPVTQIVSAEAWGRADCGFTSVSYQ | |
| | QGVLSATILYEILLGKATLYAVLVSALVLMAMVKRKDF | |
| 51 | AVRAPTSGTYKYI | TCR D Vα |
| | | CDR-3 |
| 52 | AQSVAQPEDQVNVAEGNPLTVKCTYSVSGNPYLFWYVQYPNRGLQFLLKYITGDNLVKGSYGF | TCR D Vα |
| | EAEFNKSQTSFHLKKPSALVSDSALYFCAVRAPTSGTYKYIFGTGTRLKVLAN | (aa) |
| 53 | MASAPISMLAMLFTLSGLRAQSVAQPEDQVNVAEGNPLTVKCTYSVSGNPYLFWYVQYPNRGL | TCR D Vα + |
| | QFLLKYITGDNLVKGSYGFEAEFNKSQTSFHLKKPSALVSDSALYFCAVRAPTSGTYKYIFGT | ss (aa) |
| | GTRLKVLAN | |
| 54 | MASAPISMLAMLFTLSGLRAQSVAQPEDQVNVAEGNPLTVKCTYSVSGNPYLFWYVQYPNRGL | TCR D Vα + |
| | QFLLKYITGDNLVKGSYGFEAEFNKSQTSFHLKKPSALVSDSALYFCAVRAPTSGTYKYIFGT | Cα (aa) |
| | GTRLKVLANIQNPDPAVYQLRDSKSSDKSVCLFTDFDSQTNVSQSKDSDVYITDKTVLDMRSM | |
| | DFKSNSAVAWSNKSDFACANAFNNSIIPEDTFFPSPESSCDVKLVEKSFETDTNLNFQNLSVI | |
| | GFRILLLKVAGFNLLMTLRLWSS | |
| 55 | ATGGCCTCTGCACCCATCTCGATGCTTGCGATGCTCTTCACATTGAGTGGGCTGAGAGCTCAG | TCR D Vα |
| | TCAGTGGCTCAGCCGGAAGATCAGGTCAACGTTGCTGAAGGGAATCCTCTGACTGTGAAATGC | (nt) |
| | ACCTATTCAGTCTCTGGAAACCCTTATCTTTTTTGGTATGTTCAATACCCCAACCGAGGCCTC | |
| | CAGTTCCTTCTGAAATACATCACAGGGGATAACCTGGTTAAAGGCAGCTATGGCTTTGAAGCT | |
| | GAATTTAACAAGAGCCAAACCTCCTTCCACCTGAAGAAACCATCTGCCCTTGTGAGCGACTCC | |
| | GCTTTGTACTTCTGTGCTGTGAGAGCTCCTACCTCAGGAACCTACAAATACATCTTTGGAACA | |
| | GGCACCAGGCTGAAGGTTTTAGCAAAT | |
| 56 | ATGGCCTCTGCACCCATCTCGATGCTTGCGATGCTCTTCACATTGAGTGGGCTGAGAGCTCAG | TCR D Vα + |
| | TCAGTGGCTCAGCCGGAAGATCAGGTCAACGTTGCTGAAGGGAATCCTCTGACTGTGAAATGC | Cα (nt) |
| | ACCTATTCAGTCTCTGGAAACCCTTATCTTTTTTGGTATGTTCAATACCCCAACCGAGGCCTC | |
| | CAGTTCCTTCTGAAATACATCACAGGGGATAACCTGGTTAAAGGCAGCTATGGCTTTGAAGCT | |
| | GAATTTAACAAGAGCCAAACCTCCTTCCACCTGAAGAAACCATCTGCCCTTGTGAGCGACTCC | |
| | GCTTTGTACTTCTGTGCTGTGAGAGCTCCTACCTCAGGAACCTACAAATACATCTTTGGAACA | |
| | GGCACCAGGCTGAAGGTTTTAGCAAATATCCAGAACCCTGACCCTGCCGTGTACCAGCTGAGA | |
| | GACTCTAAATCCAGTGACAAGTCTGTCTGCCTATTCACCGATTTTGATTCTCAAACAAATGTG | |
| | TCACAAAGTAAGGATTCTGATGTGTATATCACAGACAAAACTGTGCTAGACATGAGGTCTATG | |
| | GACTTCAAGAGCAACAGTGCTGTGGCCTGGAGCAACAAATCTGACTTTGCATGTGCAAACGCC | |
| | TTCAACAACAGCATTATTCCAGAAGACACCTTCTTCCCCAGCCCAGAAAGTTCCTGTGATGTC | |
| | AAGCTGGTCGAGAAAAGCTTTGAAACAGATACGAACCTAAACTTTCAAAACCTGTCAGTGATT | |
| | GGGTTCCGAATCCTCCTCCTGAAAGTGGCCGGGTTTAATCTGCTCATGACGCTGCGGCTGTGG | |
| | TCCAGC | |
| 57 | ASSLVSGNEQF | TCR D, E Vβ |
| | | CDR-3 |
| 58 | DTGVSQDPRHKITKRGQNVTFRCDPISEHNRLYWYRQTLGQGPEFLTYFQNEAQLEKSRLLSD | TCR D, E Vβ |
| | RFSAERPKGSFSTLEIQRTEQGDSAMYLCASSLVSGNEQFFGPGTRLTVLE | (aa) |
| 59 | MGTSLLCWMALCLLGADHADTGVSQDPRHKITKRGQNVTFRCDPISEHNRLYWYRQTLGQGPE | TCR D Vβ + |
| | FLTYFQNEAQLEKSRLLSDRFSAERPKGSFSTLEIQRTEQGDSAMYLCASSLVSGNEQFFGPG | ss (aa) |
| | TRLTVLE | |
| 60 | MGTSLLCWMALCLLGADHADTGVSQDPRHKITKRGQNVTFRCDPISEHNRLYWYRQTLGQGPE | TCR D Vβ + |
| | FLTYFQNEAQLEKSRLLSDRFSAERPKGSFSTLEIQRTEQGDSAMYLCASSLVSGNEQFFGPG | Cβ (aa) |
| | TRLTVLEDLKNVFPPEVAVFEPSEAEISHTQKATLVCLATGFYPDHVELSWWVNGKEVHSGVS | |
| | TDPQPLKEQPALNDSRYCLSSRLRVSATFWQNPRNHERCQVQFYGLSENDEWTQDRAKPVTQI | |
| | VSAEAWGRADCGFTSESYQQGVLSATILYEILLGKATLYAVLVSALVLMAMVKRKDSRG | |
| 61 | ATGGGTACCAGCCTCCTCTGCTGGATGGCCCTGTGTCTCCTGGGGGCAGATCACGCAGATACT | TCR D Vβ |
| | GGAGTCTCCCAGGACCCCAGACACAAGATCACAAAGAGGGGACAGAATGTAACTTTCAGGTGT | (nt) |
| | GATCCAATTTCTGAACACAACCGCCTTTATTGGTACCGACAGACCCTGGGGCAGGGCCCAGAG | |
| | TTTCTGACTTACTTCCAGAATGAAGCTCAACTAGAAAAATCAAGGCTGCTCAGTGATCGGTTC | |
| | TCTGCAGAGAGGCCTAAGGGATCTTTCTCCACCTTGGAGATCCAGCGCACAGAGCAGGGGGAC | |
| | TCGGCCATGTATCTCTGTGCCAGCAGCTTAGTCTCGGGCAATGAGCAGTTCTTCGGGCCAGGG | |
| | ACACGGCTCACCGTGCTAGAG | |
| 62 | ATGGGTACCAGCCTCCTCTGCTGGATGGCCCTGTGTCTCCTGGGGGCAGATCACGCAGATACT | TCR D Vβ + |
| | GGAGTCTCCCAGGACCCCAGACACAAGATCACAAAGAGGGGACAGAATGTAACTTTCAGGTGT | Cβ (nt) |
| | GATCCAATTTCTGAACACAACCGCCTTTATTGGTACCGACAGACCCTGGGGCAGGGCCCAGAG | |
| | TTTCTGACTTACTTCCAGAATGAAGCTCAACTAGAAAAATCAAGGCTGCTCAGTGATCGGTTC | |
| | TCTGCAGAGAGGCCTAAGGGATCTTTCTCCACCTTGGAGATCCAGCGCACAGAGCAGGGGGAC | |
| | TCGGCCATGTATCTCTGTGCCAGCAGCTTAGTCTCGGGCAATGAGCAGTTCTTCGGGCCAGGG | |
| | ACACGGCTCACCGTGCTAGAGGACCTGAAAAACGTGTTCCCACCCGAGGTCGCTGTGTTTGAG | |
| | CCATCAGAAGCAGAGATCTCCCACACCCAAAAGGCCACACTGGTATGCCTGGCCACAGGCTTC | |
| | TACCCCGACCACGTGGAGCTGAGCTGGTGGGTGAATGGGAAGGAGGTGCACAGTGGGGTCAGC | |
| | ACAGACCCGCAGCCCCTCAAGGAGCAGCCCGCCCTCAATGACTCCAGATACTGCCTGAGCAGC | |
| | CGCCTGAGGGTCTCGGCCACCTTCTGGCAGAACCCCCGCAACCACTTCCGCTGTCAAGTCCAG | |
| | TTCTACGGGCTCTCGGAGAATGACGAGTGGACCCAGGATAGGGCCAAACCTGTCACCCAGATC | |
| | GTCAGCGCCGAGGCCTGGGGTAGAGCAGACTGTGGCTTCACCTCCGAGTCTTACCAGCAAGGG | |
| | GTCCTGTCTGCCACCATCCTCTATGAGATCTTGCTAGGGAAGGCCACCTTGTATGCCGTGCTG | |
| | GTCAGTGCCCTCGTGCTGATGGCCATGGTCAAGAGAAAGGATTCCAGAGGCTAG | |
| 63 | ATGGCCTCTGCACCCATCTCGATGCTTGCGATGCTCTTCACATTGAGTGGGCTGAGAGCTCAG | TCR D full |
| | TCAGTGGCTCAGCCGGAAGATCAGGTCAACGTTGCTGAAGGGAATCCTCTGACTGTGAAATGC | construct nt |
| | ACCTATTCAGTCTCTGGAAACCCTTATCTTTTTTGGTATGTTCAATACCCCAACCGAGGCCTC | |
| | CAGTTCCTTCTGAAATACATCACAGGGGATAACCTGGTTAAAGGCAGCTATGGCTTTGAAGCT | |
| | GAATTTAACAAGAGCCAAACCTCCTTCCACCTGAAGAAACCATCTGCCCTTGTGAGCGACTCC | |
| | GCTTTGTACTTCTGTGCTGTGAGAGCTCCTACCTCAGGAACCTACAAATACATCTTTGGAACA | |
| | GGCACCAGGCTGAAGGTTTTAGCAAATATCCAGAACCCTGACCCTGCCGTGTACCAGCTGAGA | |
| | GACTCTAAATCCAGTGACAAGTCTGTCTGCCTATTCACCGATTTTGATTCTCAAACAAATGTG | |
| | TCACAAAGTAAGGATTCTGATGTGTATATCACAGACAAAACTGTGCTAGACATGAGGTCTATG | |
| | GACTTCAAGAGCAACAGTGCTGTGGCCTGGAGCAACAAATCTGACTTTGCATGTGCAAACGCC | |
| | TTCAACAACAGCATTATTCCAGAAGACACCTTCTTCCCCAGCCCAGAAAGTTCCTGTGATGTC | |
| | AAGCTGGTCGAGAAAAGCTTTGAAACAGATACGAACCTAAACTTTCAAAACCTGTCAGTGATT | |
| | GGGTTCCGAATCCTCCTCCTGAAAGTGGCCGGGTTTAATCTGCTCATGACGCTGCGGCTGTGG | |
| | TCCAGCGGCTCCGGAGCCACGAACTTCTCTCTGTTAAAGCAAGCAGGAGACGTGGAAGAAAAC | |
| | CCCGGTCCCATGGGTACCAGCCTCCTCTGCTGGATGGCCCTGTGTCTCCTGGGGGCAGATCAC | |
| | GCAGATACTGGAGTCTCCCAGGACCCCAGACACAAGATCACAAAGAGGGGACAGAATGTAACT | |
| | TTCAGGTGTGATCCAATTTCTGAACACAACCGCCTTTATTGGTACCGACAGACCCTGGGGCAG | |
| | GGCCCAGAGTTTCTGACTTACTTCCAGAATGAAGCTCAACTAGAAAAATCAAGGCTGCTCAGT | |
| | GATCGGTTCTCTGCAGAGAGGCCTAAGGGATCTTTCTCCACCTTGGAGATCCAGCGCACAGAG | |
| | CAGGGGGACTCGGCCATGTATCTCTGTGCCAGCAGCTTAGTCTCGGGCAATGAGCAGTTCTTC | |
| | GGGCCAGGGACACGGCTCACCGTGCTAGAGGACCTGAAAAACGTGTTCCCACCCGAGGTCGCT | |
| | GTGTTTGAGCCATCAGAAGCAGAGATCTCCCACACCCAAAAGGCCACACTGGTATGCCTGGCC | |
| | ACAGGCTTCTACCCCGACCACGTGGAGCTGAGCTGGTGGGTGAATGGGAAGGAGGTGCACAGT | |
| | GGGGTCAGCACAGACCCGCAGCCCCTCAAGGAGCAGCCCGCCCTCAATGACTCCAGATACTGC | |
| | CTGAGCAGCCGCCTGAGGGTCTCGGCCACCTTCTGGCAGAACCCCCGCAACCACTTCCGCTGT | |
| | CAAGTCCAGTTCTACGGGCTCTCGGAGAATGACGAGTGGACCCAGGATAGGGCCAAACCTGTC | |
| | ACCCAGATCGTCAGCGCCGAGGCCTGGGGTAGAGCAGACTGTGGCTTCACCTCCGAGTCTTAC | |
| | CAGCAAGGGGTCCTGTCTGCCACCATCCTCTATGAGATCTTGCTAGGGAAGGCCACCTTGTAT | |
| | GCCGTGCTGGTCAGTGCCCTCGTGCTGATGGCCATGGTCAAGAGAAAGGATTCCAGAGGCTAG | |
| 64 | MASAPISMLAMLFTLSGLRAQSVAQPEDQVNVAEGNPLTVKCTYSVSGNPYLFWYVQYPNRGL | TCR D full |
| | QFLLKYITGDNLVKGSYGFEAEFNKSQTSFHLKKPSALVSDSALYFCAVRAPTSGTYKYIFGT | construct aa |
| | GTRLKVLANIQNPDPAVYQLRDSKSSDKSVCLFTDFDSQTNVSQSKDSDVYITDKTVLDMRSM | |
| | DFKSNSAVAWSNKSDFACANAFNNSIIPEDTFFPSPESSCDVKLVEKSFETDTNLNFQNLSVI | |
| | GFRILLLKVAGFNLLMTLRLWSSGSGATNFSLLKQAGDVEENPGPMGTSLLCWMALCLLGADH | |
| | ADTGVSQDPRHKITKRGQNVTFRCDPISEHNRLYWYRQTLGQGPEFLTYFQNEAQLEKSRLLS | |
| | DRFSAERPKGSFSTLEIQRTEQGDSAMYLCASSLVSGNEQFFGPGTRLTVLEDLKNVFPPEVA | |
| | VFEPSEAEISHTQKATLVCLATGFYPDHVELSWWVNGKEVHSGVSTDPQPLKEQPALNDSRYC | |
| | LSSRLRVSATFWQNPRNHFRCQVQFYGLSENDEWTQDRAKPVTQIVSAEAWGRADCGFTSESY | |
| | QQGVLSATILYEILLGKATLYAVLVSALVLMAMVKRKDSRG | |
| 65 | AVRGPTSGTYKYI | TCR E Vα |
| | | CDR-3 |
| 66 | AQSVAQPEDQVNVAEGNPLTVKCTYSVSGNPYLFWYVQYPNRGLQFLLKYITGDNLVKGSYGF | TCR E Vα |
| | EAEFNKSQTSFHLKKPSALVSDSALYFCAVRGPTSGTYKYIFGTGTRLKVLAN | (aa) |
| 67 | MASAPISMLAMLFTLSGLRAQSVAQPEDQVNVAEGNPLTVKCTYSVSGNPYLFWYVQYPNRGL | TCR E Vα + |
| | QFLLKYITGDNLVKGSYGFEAEFNKSQTSFHLKKPSALVSDSALYFCAVRGPTSGTYKYIFGT | ss (aa) |
| | GTRLKVLAN | |
| 68 | MASAPISMLAMLFTLSGLRAQSVAQPEDQVNVAEGNPLTVKCTYSVSGNPYLFWYVQYPNRGL | TCR E Vα + |
| | QFLLKYITGDNLVKGSYGFEAEFNKSQTSFHLKKPSALVSDSALYFCAVRGPTSGTYKYIFGT | Cα (aa) |
| | GTRLKVLANIQNPDPAVYQLRDSKSSDKSVCLFTDFDSQTNVSQSKDSDVYITDKTVLDMRSM | |
| | DFKSNSAVAWSNKSDFACANAFNNSIIPEDTFFPSPESSCDVKLVEKSFETDTNLNFQNLSVI | |
| | GFRILLLKVAGFNLLMTLRLWSS | |
| 69 | ATGGCCTCTGCACCCATCTCGATGCTTGCGATGCTCTTCACATTGAGTGGGCTGAGAGCTCAG | TCR E Vα |
| | TCAGTGGCTCAGCCGGAAGATCAGGTCAACGTTGCTGAAGGGAATCCTCTGACTGTGAAATGC | (nt) |
| | ACCTATTCAGTCTCTGGAAACCCTTATCTTTTTTGGTATGTTCAATACCCCAACCGAGGCCTC | |
| | CAGTTCCTTCTGAAATACATCACAGGGGATAACCTGGTTAAAGGCAGCTATGGCTTTGAAGCT | |
| | GAATTTAACAAGAGCCAAACCTCCTTCCACCTGAAGAAACCATCTGCCCTTGTGAGCGACTCC | |
| | GCTTTGTACTTCTGTGCTGTGAGAGGGCCTACCTCAGGAACCTACAAATACATCTTTGGAACA | |
| | GGCACCAGGCTGAAGGTTTTAGCAAAT | |
| 70 | ATGGCCTCTGCACCCATCTCGATGCTTGCGATGCTCTTCACATTGAGTGGGCTGAGAGCTCAG | TCR E Vα + |
| | TCAGTGGCTCAGCCGGAAGATCAGGTCAACGTTGCTGAAGGGAATCCTCTGACTGTGAAATGC | Cα (nt) |
| | ACCTATTCAGTCTCTGGAAACCCTTATCTTTTTTGGTATGTTCAATACCCCAACCGAGGCCTC | |
| | CAGTTCCTTCTGAAATACATCACAGGGGATAACCTGGTTAAAGGCAGCTATGGCTTTGAAGCT | |
| | GAATTTAACAAGAGCCAAACCTCCTTCCACCTGAAGAAACCATCTGCCCTTGTGAGCGACTCC | |
| | GCTTTGTACTTCTGTGCTGTGAGAGGGCCTACCTCAGGAACCTACAAATACATCTTTGGAACA | |
| | GGCACCAGGCTGAAGGTTTTAGCAAATATCCAGAACCCTGACCCTGCCGTGTACCAGCTGAGA | |
| | GACTCTAAATCCAGTGACAAGTCTGTCTGCCTATTCACCGATTTTGATTCTCAAACAAATGTG | |
| | TCACAAAGTAAGGATTCTGATGTGTATATCACAGACAAAACTGTGCTAGACATGAGGTCTATG | |
| | GACTTCAAGAGCAACAGTGCTGTGGCCTGGAGCAACAAATCTGACTTTGCATGTGCAAACGCC | |
| | TTCAACAACAGCATTATTCCAGAAGACACCTTCTTCCCCAGCCCAGAAAGTTCCTGTGATGTC | |
| | AAGCTGGTCGAGAAAAGCTTTGAAACAGATACGAACCTAAACTTTCAAAACCTGTCAGTGATT | |
| | GGGTTCCGAATCCTCCTCCTGAAAGTGGCCGGGTTTAATCTGCTCATGACGCTGCGGCTGTGG | |
| | TCCAGC | |
| 71 | MGTSLLCWMALCLLGADHADTGVSQDPRHKITKRGQNVTFRCDPISEHNRLYWYRQTLGQGPE | TCR E Vβ + |
| | FLTYFQNEAQLEKSRLLSDRFSAERPKGSFSTLEIQRTEQGDSAMYLCASSLVSGNEQFFGPG | Cβ (aa) |
| | TRLTVLEDLNKVFPPEVAVFEPSEAEISHTQKATLVCLATGFFPDHVELSWWVNGKEVHSGVS | |
| | TDPQPLKEQPALNDSRYCLSSRLRVSATFWQNPRNHFRCQVQFYGLSENDEWTQDRAKPVTQI | |
| | VSAEAWGRADCGFTSVSYQQGVLSATILYEILLGKATLYAVLVSALVLMAMVKRKDF | |
| 72 | ATGGGTACCAGCCTCCTCTGCTGGATGGCCCTGTGTCTCCTGGGGGCAGATCACGCAGATACT | TCR E Vβ |
| | GGAGTCTCCCAGGACCCCAGACACAAGATCACAAAGAGGGGACAGAATGTAACTTTCAGGTGT | (nt) |
| | GATCCAATTTCTGAACACAACCGCCTTTATTGGTACCGACAGACCCTGGGGCAGGGCCCAGAG | |
| | TTTCTGACTTACTTCCAGAATGAAGCTCAACTAGAAAAATCAAGGCTGCTCAGTGATCGGTTC | |
| | TCTGCAGAGAGGCCTAAGGGATCTTTCTCCACCTTGGAGATCCAGCGCACAGAGCAGGGGGAC | |
| | TCGGCCATGTATCTCTGTGCCAGCAGCTTAGTAAGCGGAAATGAGCAGTTCTTCGGGCCAGGG | |
| | ACACGGCTCACCGTGCTAGAG | |
| 73 | ATGGGTACCAGCCTCCTCTGCTGGATGGCCCTGTGTCTCCTGGGGGCAGATCACGCAGATACT | TCR E Vβ + |
| | GGAGTCTCCCAGGACCCCAGACACAAGATCACAAAGAGGGGACAGAATGTAACTTTCAGGTGT | Cβ (nt) |
| | GATCCAATTTCTGAACACAACCGCCTTTATTGGTACCGACAGACCCTGGGGCAGGGCCCAGAG | |
| | TTTCTGACTTACTTCCAGAATGAAGCTCAACTAGAAAAATCAAGGCTGCTCAGTGATCGGTTC | |
| | TCTGCAGAGAGGCCTAAGGGATCTTTCTCCACCTTGGAGATCCAGCGCACAGAGCAGGGGGAC | |
| | TCGGCCATGTATCTCTGTGCCAGCAGCTTAGTAAGCGGAAATGAGCAGTTCTTCGGGCCAGGG | |
| | ACACGGCTCACCGTGCTAGAGGACCTGAACAAGGTGTTCCCACCCGAGGTCGCTGTGTTTGAG | |
| | CCATCAGAAGCAGAGATCTCCCACACCCAAAAGGCCACACTGGTGTGCCTGGCCACAGGCTTC | |
| | TTCCCCGACCACGTGGAGCTGAGCTGGTGGGTGAATGGGAAGGAGGTGCACAGTGGGGTCAGC | |
| | ACAGACCCGCAGCCCCTCAAGGAGCAGCCCGCCCTCAATGACTCCAGATACTGCCTGAGCAGC | |
| | CGCCTGAGGGTCTCGGCCACCTTCTGGCAGAACCCCCGCAACCACTTCCGCTGTCAAGTCCAG | |
| | TTCTACGGGCTCTCGGAGAATGACGAGTGGACCCAGGATAGGGCCAAACCCGTCACCCAGATC | |
| | GTCAGCGCCGAGGCCTGGGGTAGAGCAGACTGTGGCTTTACCTCGGTGTCCTACCAGCAAGGG | |
| | GTCCTGTCTGCCACCATCCTCTATGAGATCCTGCTAGGGAAGGCCACCCTGTATGCTGTGCTG | |
| | GTCAGCGCCCTTGTGTTGATGGCCATGGTCAAGAGAAAGGATTTCTGA | |
| 74 | ATGGCCTCTGCACCCATCTCGATGCTTGCGATGCTCTTCACATTGAGTGGGCTGAGAGCTCAG | TCR E full |
| | TCAGTGGCTCAGCCGGAAGATCAGGTCAACGTTGCTGAAGGGAATCCTCTGACTGTGAAATGC | construct nt |
| | ACCTATTCAGTCTCTGGAAACCCTTATCTTTTTTGGTATGTTCAATACCCCAACCGAGGCCTC | |
| | CAGTTCCTTCTGAAATACATCACAGGGGATAACCTGGTTAAAGGCAGCTATGGCTTTGAAGCT | |
| | GAATTTAACAAGAGCCAAACCTCCTTCCACCTGAAGAAACCATCTGCCCTTGTGAGCGACTCC | |
| | GCTTTGTACTTCTGTGCTGTGAGAGGGCCTACCTCAGGAACCTACAAATACATCTTTGGAACA | |
| | GGCACCAGGCTGAAGGTTTTAGCAAATATCCAGAACCCTGACCCTGCCGTGTACCAGCTGAGA | |
| | GACTCTAAATCCAGTGACAAGTCTGTCTGCCTATTCACCGATTTTGATTCTCAAACAAATGTG | |
| | TCACAAAGTAAGGATTCTGATGTGTATATCACAGACAAAACTGTGCTAGACATGAGGTCTATG | |
| | GACTTCAAGAGCAACAGTGCTGTGGCCTGGAGCAACAAATCTGACTTTGCATGTGCAAACGCC | |
| | TTCAACAACAGCATTATTCCAGAAGACACCTTCTTCCCCAGCCCAGAAAGTTCCTGTGATGTC | |
| | AAGCTGGTCGAGAAAAGCTTTGAAACAGATACGAACCTAAACTTTCAAAACCTGTCAGTGATT | |
| | GGGTTCCGAATCCTCCTCCTGAAAGTGGCCGGGTTTAATCTGCTCATGACGCTGCGGCTGTGG | |
| | TCCAGCGGCTCCGGAGCCACGAACTTCTCTCTGTTAAAGCAAGCAGGAGACGTGGAAGAAAAC | |
| | CCCGGTCCCATGGGTACCAGCCTCCTCTGCTGGATGGCCCTGTGTCTCCTGGGGGCAGATCAC | |
| | GCAGATACTGGAGTCTCCCAGGACCCCAGACACAAGATCACAAAGAGGGGACAGAATGTAACT | |
| | TTCAGGTGTGATCCAATTTCTGAACACAACCGCCTTTATTGGTACCGACAGACCCTGGGGCAG | |
| | GGCCCAGAGTTTCTGACTTACTTCCAGAATGAAGCTCAACTAGAAAAATCAAGGCTGCTCAGT | |
| | GATCGGTTCTCTGCAGAGAGGCCTAAGGGATCTTTCTCCACCTTGGAGATCCAGCGCACAGAG | |
| | CAGGGGGACTCGGCCATGTATCTCTGTGCCAGCAGCTTAGTAAGCGGAAATGAGCAGTTCTTC | |
| | GGGCCAGGGACACGGCTCACCGTGCTAGAGGACCTGAACAAGGTGTTCCCACCCGAGGTCGCT | |
| | GTGTTTGAGCCATCAGAAGCAGAGATCTCCCACACCCAAAAGGCCACACTGGTGTGCCTGGCC | |
| | ACAGGCTTCTTCCCCGACCACGTGGAGCTGAGCTGGTGGGTGAATGGGAAGGAGGTGCACAGT | |
| | GGGGTCAGCACAGACCCGCAGCCCCTCAAGGAGCAGCCCGCCCTCAATGACTCCAGATACTGC | |
| | CTGAGCAGCCGCCTGAGGGTCTCGGCCACCTTCTGGCAGAACCCCCGCAACCACTTCCGCTGT | |
| | CAAGTCCAGTTCTACGGGCTCTCGGAGAATGACGAGTGGACCCAGGATAGGGCCAAACCCGTC | |
| | ACCCAGATCGTCAGCGCCGAGGCCTGGGGTAGAGCAGACTGTGGCTTTACCTCGGTGTCCTAC | |
| | CAGCAAGGGGTCCTGTCTGCCACCATCCTCTATGAGATCCTGCTAGGGAAGGCCACCCTGTAT | |
| | GCTGTGCTGGTCAGCGCCCTTGTGTTGATGGCCATGGTCAAGAGAAAGGATTTCTGA | |
| 75 | MASAPISMLAMLFTLSGLRAQSVAQPEDQVNVAEGNPLTVKCTYSVSGNPYLFWYVQYPNRGL | TCR E full |
| | QFLLKYITGDNLVKGSYGFEAEFNKSQTSFHLKKPSALVSDSALYFCAVRGPTSGTYKYIFGT | construct aa |
| | GTRLKVLANIQNPDPAVYQLRDSKSSDKSVCLFTDFDSQTNVSQSKDSDVYITDKTVLDMRSM | |
| | DFKSNSAVAWSNKSDFACANAFNNSIIPEDTFFPSPESSCDVKLVEKSFETDTNLNFQNLSVI | |
| | GFRILLLKVAGFNLLMTLRLWSSGSGATNFSLLKQAGDVEENPGPMGTSLLCWMALCLLGADH | |
| | ADTGVSQDPRHKITKRGQNVTFRCDPISEHNRLYWYRQTLGQGPEFLTYFQNEAQLEKSRLLS | |
| | DRFSAERPKGSFSTLEIQRTEQGDSAMYLCASSLVSGNEQFFGPGTRLTVLEDLNKVFPPEVA | |
| | VFEPSEAEISHTQKATLVCLATGFFPDHVELSWWVNGKEVHSGVSTDPQPLKEQPALNDSRYC | |
| | LSSRLRVSATFWQNPRNHFRCQVQFYGLSENDEWTQDRAKPVTQIVSAEAWGRADCGFTSVSY | |
| | QQGVLSATILYEILLGKATLYAVLVSALVLMAMVKRKDF | |
| 76 | DSASNY | TCR F, H, N, |
| | | O, Q Vα |
| | | CDR-1 |
| 77 | IRSNVGE | TCR F, H, N, |
| | | O, Q Vα |
| | | CDR-2 |
| 78 | AAHLTGGGNKLT | TCR F Vα |
| | | CDR-3 |
| 79 | GENVEQHPSTLSVQEGDSAVIKCTYSDSASNYFPWYKQELGKRPQLIIDIRSNVGEKKDQRIA | TCR F Vα |
| | VTLNKTAKHFSLHITETQPEDSAVYFCAAHLTGGGNKLTFGTGTQLKVELN | (aa) |
| 80 | MSIRAVFIFLWLQLDLVNGENVEQHPSTLSVQEGDSAVIKCTYSDSASNYFPWYKQELGKRPQ | TCR F Vα + |
| | LIIDIRSNVGEKKDQRIAVTLNKTAKHFSLHITETQPEDSAVYFCAAHLTGGGNKLTFGTGTQ | ss (aa) |
| | LKVELN | |
| 81 | MSIRAVFIFLWLQLDLVNGENVEQHPSTLSVQEGDSAVIKCTYSDSASNYFPWYKQELGKRPQ | TCR F Vα + |
| | LIIDIRSNVGEKKDQRIAVTLNKTAKHFSLHITETQPEDSAVYFCAAHLTGGGNKLTFGTGTQ | Cα (aa) |
| | LKVELNIQKPDPAVYQLRDSKSSDKSVCLFTDFDSQTNVSQSKDSDVYITDKTVLDMRSMDFK | |
| | SNSAVAWSNKSDFACANAFNNSIIPEDTFFPSPESSCDVKLVEKSFETDTNLNFQNLSVIGFR | |
| | ILLLKVAGFNLLMTLRLWSS | |
| 82 | ATGTCCATTCGAGCTGTATTTATATTCCTGTGGCTGCAGCTGGACTTGGTGAATGGAGAGAAT | TCR F Vα |
| | GTGGAGCAGCATCCTTCAACCCTGAGTGTCCAGGAGGGAGACAGCGCTGTTATCAAGTGTACT | (nt) |
| | TATTCAGACAGTGCCTCAAACTACTTCCCTTGGTATAAGCAAGAACTTGGAAAAAGACCTCAG | |
| | CTTATTATAGACATTCGTTCAAATGTGGGCGAAAAGAAAGACCAACGAATTGCTGTTACATTG | |
| | AACAAGACAGCCAAACATTTCTCCCTGCACATCACAGAGACCCAACCTGAAGACTCGGCTGTC | |
| | TACTTCTGTGCAGCACATCTGACGGGAGGAGGAAACAAACTCACCTTTGGGACAGGCACTCAG | |
| | CTAAAAGTGGAACTCAAT | |
| 83 | ATGTCCATTCGAGCTGTATTTATATTCCTGTGGCTGCAGCTGGACTTGGTGAATGGAGAGAAT | TCR F Vα + |
| | GTGGAGCAGCATCCTTCAACCCTGAGTGTCCAGGAGGGAGACAGCGCTGTTATCAAGTGTACT | Cα (nt) |
| | TATTCAGACAGTGCCTCAAACTACTTCCCTTGGTATAAGCAAGAACTTGGAAAAAGACCTCAG | |
| | CTTATTATAGACATTCGTTCAAATGTGGGCGAAAAGAAAGACCAACGAATTGCTGTTACATTG | |
| | AACAAGACAGCCAAACATTTCTCCCTGCACATCACAGAGACCCAACCTGAAGACTCGGCTGTC | |
| | TACTTCTGTGCAGCACATCTGACGGGAGGAGGAAACAAACTCACCTTTGGGACAGGCACTCAG | |
| | CTAAAAGTGGAACTCAATATCCAGAAGCCTGACCCTGCCGTGTACCAGCTGAGAGACTCTAAA | |
| | TCCAGTGACAAGTCTGTCTGCCTATTCACCGATTTTGATTCTCAAACAAATGTGTCACAAAGT | |
| | AAGGATTCTGATGTGTATATCACAGACAAAACTGTGCTAGACATGAGGTCTATGGACTTCAAG | |
| | AGCAACAGTGCTGTGGCCTGGAGCAACAAATCTGACTTTGCATGTGCAAACGCCTTCAACAAC | |
| | AGCATTATTCCAGAAGACACCTTCTTCCCCAGCCCAGAAAGTTCCTGTGATGTCAAGCTGGTC | |
| | GAGAAAAGCTTTGAAACAGATACGAACCTAAACTTTCAAAACCTGTCAGTGATTGGGTTCCGA | |
| 84 | ASSSRAGGETQY | TCR F Vβ |
| | | CDR-3 |
| 85 | DTGVSQDPRHKITKRGQNVTFRCDPISEHNRLYWYRQTLGQGPEFLTYFQNEAQLEKSRLLSD | TCR F Vβ |
| | RFSAERPKGSFSTLEIQRTEQGDSAMYLCASSSRAGGETQYFGPGTRLLVLE | (aa) |
| 86 | MGTSLLCWMALCLLGADHADTGVSQDPRHKITKRGQNVTFRCDPISEHNRLYWYRQTLGQGPE | TCR F Vβ + |
| | FLTYFQNEAQLEKSRLLSDRFSAERPKGSESTLEIQRTEQGDSAMYLCASSSRAGGETQYFGP | ss (aa) |
| | GTRLLVLE | |
| 87 | MGTSLLCWMALCLLGADHADTGVSQDPRHKITKRGQNVTFRCDPISEHNRLYWYRQTLGQGPE | TCR F Vβ + |
| | FLTYFQNEAQLEKSRLLSDRFSAERPKGSESTLEIQRTEQGDSAMYLCASSSRAGGETQYFGP | Cβ (aa) |
| | GTRLLVLEDLKNVFPPEVAVFEPSEAEISHTQKATLVCLATGFYPDHVELSWWVNGKEVHSGV | |
| | STDPQPLKEQPALNDSRYCLSSRLRVSATFWQNPRNHERCQVQFYGLSENDEWTQDRAKPVTQ | |
| | IVSAEAWGRADCGFTSESYQQGVLSATILYEILLGKATLYAVLVSALVLMAMVKRKDSRG* | |
| 88 | ATGGGTACCAGCCTCCTCTGCTGGATGGCCCTGTGTCTCCTGGGGGCAGATCACGCAGATACT | TCR F Vβ |
| | GGAGTCTCCCAGGACCCCAGACACAAGATCACAAAGAGGGGACAGAATGTAACTTTCAGGTGT | (nt) |
| | GATCCAATTTCTGAACACAACCGCCTTTATTGGTACCGACAGACCCTGGGGCAGGGCCCAGAG | |
| | TTTCTGACTTACTTCCAGAATGAAGCTCAACTAGAAAAATCAAGGCTGCTCAGTGATCGGTTC | |
| | TCTGCAGAGAGGCCTAAGGGATCTTTCTCCACCTTGGAGATCCAGCGCACAGAGCAGGGGGAC | |
| | TCGGCCATGTATCTCTGTGCCAGCAGCTCCCGGGCCGGAGGGGAGACCCAGTACTTCGGGCCA | |
| | GGCACGCGGCTCCTGGTGCTCGAG | |
| 89 | ATGGGTACCAGCCTCCTCTGCTGGATGGCCCTGTGTCTCCTGGGGGCAGATCACGCAGATACT | TCR F Vβ + |
| | GGAGTCTCCCAGGACCCCAGACACAAGATCACAAAGAGGGGACAGAATGTAACTTTCAGGTGT | Cβ (nt) |
| | GATCCAATTTCTGAACACAACCGCCTTTATTGGTACCGACAGACCCTGGGGCAGGGCCCAGAG | |
| | TTTCTGACTTACTTCCAGAATGAAGCTCAACTAGAAAAATCAAGGCTGCTCAGTGATCGGTTC | |
| | TCTGCAGAGAGGCCTAAGGGATCTTTCTCCACCTTGGAGATCCAGCGCACAGAGCAGGGGGAC | |
| | TCGGCCATGTATCTCTGTGCCAGCAGCTCCCGGGCCGGAGGGGAGACCCAGTACTTCGGGCCA | |
| | GGCACGCGGCTCCTGGTGCTCGAGGACCTGAAAAACGTGTTCCCACCCGAGGTCGCTGTGTTT | |
| | GAGCCATCAGAAGCAGAGATCTCCCACACCCAAAAGGCCACACTGGTATGCCTGGCCACAGGC | |
| | TTCTACCCCGACCACGTGGAGCTGAGCTGGTGGGTGAATGGGAAGGAGGTGCACAGTGGGGTC | |
| | AGCACAGACCCGCAGCCCCTCAAGGAGCAGCCCGCCCTCAATGACTCCAGATACTGCCTGAGC | |
| | AGCCGCCTGAGGGTCTCGGCCACCTTCTGGCAGAACCCCCGCAACCACTTCCGCTGTCAAGTC | |
| | CAGTTCTACGGGCTCTCGGAGAATGACGAGTGGACCCAGGATAGGGCCAAACCTGTCACCCAG | |
| | ATCGTCAGCGCCGAGGCCTGGGGTAGAGCAGACTGTGGCTTCACCTCCGAGTCTTACCAGCAA | |
| | GGGGTCCTGTCTGCCACCATCCTCTATGAGATCTTGCTAGGGAAGGCCACCTTGTATGCCGTG | |
| | CTGGTCAGTGCCCTCGTGCTGATGGCCATGGTCAAGAGAAAGGATTCCAGAGGCTAG | |
| 90 | ATGTCCATTCGAGCTGTATTTATATTCCTGTGGCTGCAGCTGGACTTGGTGAATGGAGAGAAT | TCR F full |
| | GTGGAGCAGCATCCTTCAACCCTGAGTGTCCAGGAGGGAGACAGCGCTGTTATCAAGTGTACT | construct nt |
| | TATTCAGACAGTGCCTCAAACTACTTCCCTTGGTATAAGCAAGAACTTGGAAAAAGACCTCAG | |
| | CTTATTATAGACATTCGTTCAAATGTGGGCGAAAAGAAAGACCAACGAATTGCTGTTACATTG | |
| | AACAAGACAGCCAAACATTTCTCCCTGCACATCACAGAGACCCAACCTGAAGACTCGGCTGTC | |
| | TACTTCTGTGCAGCACATCTGACGGGAGGAGGAAACAAACTCACCTTTGGGACAGGCACTCAG | |
| | CTAAAAGTGGAACTCAATATCCAGAAGCCTGACCCTGCCGTGTACCAGCTGAGAGACTCTAAA | |
| | TCCAGTGACAAGTCTGTCTGCCTATTCACCGATTTTGATTCTCAAACAAATGTGTCACAAAGT | |
| | AAGGATTCTGATGTGTATATCACAGACAAAACTGTGCTAGACATGAGGTCTATGGACTTCAAG | |
| | AGCAACAGTGCTGTGGCCTGGAGCAACAAATCTGACTTTGCATGTGCAAACGCCTTCAACAAC | |
| | AGCATTATTCCAGAAGACACCTTCTTCCCCAGCCCAGAAAGTTCCTGTGATGTCAAGCTGGTC | |
| | GAGAAAAGCTTTGAAACAGATACGAACCTAAACTTTCAAAACCTGTCAGTGATTGGGTTCCGA | |
| | ATCCTCCTCCTGAAAGTGGCCGGGTTTAATCTGCTCATGACGCTGCGGCTGTGGTCCAGCGGC | |
| | TCCGGAGCCACGAACTTCTCTCTGTTAAAGCAAGCAGGAGACGTGGAAGAAAACCCCGGTCCC | |
| | ATGGGTACCAGCCTCCTCTGCTGGATGGCCCTGTGTCTCCTGGGGGCAGATCACGCAGATACT | |
| | GGAGTCTCCCAGGACCCCAGACACAAGATCACAAAGAGGGGACAGAATGTAACTTTCAGGTGT | |
| | GATCCAATTTCTGAACACAACCGCCTTTATTGGTACCGACAGACCCTGGGGCAGGGCCCAGAG | |
| | TTTCTGACTTACTTCCAGAATGAAGCTCAACTAGAAAAATCAAGGCTGCTCAGTGATCGGTTC | |
| | TCTGCAGAGAGGCCTAAGGGATCTTTCTCCACCTTGGAGATCCAGCGCACAGAGCAGGGGGAC | |
| | TCGGCCATGTATCTCTGTGCCAGCAGCTCCCGGGCCGGAGGGGAGACCCAGTACTTCGGGCCA | |
| | GGCACGCGGCTCCTGGTGCTCGAGGACCTGAAAAACGTGTTCCCACCCGAGGTCGCTGTGTTT | |
| | GAGCCATCAGAAGCAGAGATCTCCCACACCCAAAAGGCCACACTGGTATGCCTGGCCACAGGC | |
| | TTCTACCCCGACCACGTGGAGCTGAGCTGGTGGGTGAATGGGAAGGAGGTGCACAGTGGGGTC | |
| | AGCACAGACCCGCAGCCCCTCAAGGAGCAGCCCGCCCTCAATGACTCCAGATACTGCCTGAGC | |
| | AGCCGCCTGAGGGTCTCGGCCACCTTCTGGCAGAACCCCCGCAACCACTTCCGCTGTCAAGTC | |
| | CAGTTCTACGGGCTCTCGGAGAATGACGAGTGGACCCAGGATAGGGCCAAACCTGTCACCCAG | |
| | ATCGTCAGCGCCGAGGCCTGGGGTAGAGCAGACTGTGGCTTCACCTCCGAGTCTTACCAGCAA | |
| | GGGGTCCTGTCTGCCACCATCCTCTATGAGATCTTGCTAGGGAAGGCCACCTTGTATGCCGTG | |
| | CTGGTCAGTGCCCTCGTGCTGATGGCCATGGTCAAGAGAAAGGATTCCAGAGGCTAG | |
| 91 | MSIRAVFIFLWLQLDLVNGENVEQHPSTLSVQEGDSAVIKCTYSDSASNYFPWYKQELGKRPQ | TCR F full |
| | LIIDIRSNVGEKKDQRIAVTLNKTAKHFSLHITETQPEDSAVYFCAAHLTGGGNKLTFGTGTQ | construct aa |
| | LKVELNIQKPDPAVYQLRDSKSSDKSVCLFTDFDSQTNVSQSKDSDVYITDKTVLDMRSMDFK | |
| | SNSAVAWSNKSDFACANAFNNSIIPEDTFFPSPESSCDVKLVEKSFETDTNLNFQNLSVIGFR | |
| | ILLLKVAGFNLLMTLRLWSSGSGATNFSLLKQAGDVEENPGPMGTSLLCWMALCLLGADHADT | |
| | GVSQDPRHKITKRGQNVTFRCDPISEHNRLYWYRQTLGQGPEFLTYFQNEAQLEKSRLLSDRF | |
| | SAERPKGSFSTLEIQRTEQGDSAMYLCASSSRAGGETQYFGPGTRLLVLEDLKNVEPPEVAVF | |
| | EPSEAEISHTQKATLVCLATGFYPDHVELSWWVNGKEVHSGVSTDPQPLKEQPALNDSRYCLS | |
| | SRLRVSATFWQNPRNHFRCQVQFYGLSENDEWTQDRAKPVTQIVSAEAWGRADCGFTSESYQQ | |
| | GVLSATILYEILLGKATLYAVLVSALVLMAMVKRKDSRG* | |
| 92 | AGTGANNLF | TCR G Vα |
| | | CDR-3 |
| 93 | SQQGEEDPQALSIQEGENATMNCSYKTSINNLQWYRQNSGRGLVHLILIRSNEREKHSGRLRV | TCR G Vα |
| | TLDTSKKSSSLLITASRAADTASYFCAGTGANNLFFGTGTRLTVIP | (aa) |
| 94 | METLLGVSLVILWLQLARVNSQQGEEDPQALSIQEGENATMNCSYKTSINNLQWYRQNSGRGL | TCR G Vα + |
| | VHLILIRSNEREKHSGRLRVTLDTSKKSSSLLITASRAADTASYFCAGTGANNLFFGTGTRLT | ss (aa) |
| | VIP | |
| 95 | METLLGVSLVILWLQLARVNSQQGEEDPQALSIQEGENATMNCSYKTSINNLQWYRQNSGRGL | TCR G Vα + |
| | VHLILIRSNEREKHSGRLRVTLDTSKKSSSLLITASRAADTASYFCAGTGANNLFFGTGTRLT | Cα (aa) |
| | VIPYIQKPDPAVYQLRDSKSSDKSVCLFTDFDSQTNVSQSKDSDVYITDKTVLDMRSMDFKSN | |
| | SAVAWSNKSDFACANAFNNSIIPEDTFFPSPESSCDVKLVEKSFETDTNLNFQNLSVIGFRIL | |
| | LLKVAGFNLLMTLRLWSS | |
| 96 | ATGGAAACTCTCCTGGGAGTGTCTTTGGTGATTCTATGGCTTCAACTGGCTAGGGTGAACAGT | TCR G Vα |
| | CAACAGGGAGAAGAGGATCCTCAGGCCTTGAGCATCCAGGAGGGTGAAAATGCCACCATGAAC | (nt) |
| | TGCAGTTACAAAACTAGTATAAACAATTTACAGTGGTATAGACAAAATTCAGGTAGAGGCCTT | |
| | GTCCACCTAATTTTAATACGTTCAAATGAAAGAGAGAAACACAGTGGAAGATTAAGAGTCACG | |
| | CTTGACACTTCCAAGAAAAGCAGTTCCTTGTTGATCACGGCTTCCCGGGCAGCAGACACTGCT | |
| | TCTTACTTCTGTGCTGGAACTGGGGCAAACAACCTCTTCTTTGGGACTGGAACGAGACTCACC | |
| | GTTATTCCCTAT | |
| 97 | ATGGAAACTCTCCTGGGAGTGTCTTTGGTGATTCTATGGCTTCAACTGGCTAGGGTGAACAGT | TCR G Vα + |
| | CAACAGGGAGAAGAGGATCCTCAGGCCTTGAGCATCCAGGAGGGTGAAAATGCCACCATGAAC | Cα (nt) |
| | TGCAGTTACAAAACTAGTATAAACAATTTACAGTGGTATAGACAAAATTCAGGTAGAGGCCTT | |
| | GTCCACCTAATTTTAATACGTTCAAATGAAAGAGAGAAACACAGTGGAAGATTAAGAGTCACG | |
| | CTTGACACTTCCAAGAAAAGCAGTTCCTTGTTGATCACGGCTTCCCGGGCAGCAGACACTGCT | |
| | TCTTACTTCTGTGCTGGAACTGGGGCAAACAACCTCTTCTTTGGGACTGGAACGAGACTCACC | |
| | GTTATTCCCTATATCCAGAAGCCTGACCCTGCCGTGTACCAGCTGAGAGACTCTAAATCCAGT | |
| | GACAAGTCTGTCTGCCTATTCACCGATTTTGATTCTCAAACAAATGTGTCACAAAGTAAGGAT | |
| | TCTGATGTGTATATCACAGACAAAACTGTGCTAGACATGAGGTCTATGGACTTCAAGAGCAAC | |
| | AGTGCTGTGGCCTGGAGCAACAAATCTGACTTTGCATGTGCAAACGCCTTCAACAACAGCATT | |
| | ATTCCAGAAGACACCTTCTTCCCCAGCCCAGAAAGTTCCTGTGATGTCAAGCTGGTCGAGAAA | |
| | AGCTTTGAAACAGATACGAACCTAAACTTTCAAAACCTGTCAGTGATTGGGTTCCGAATCCTC | |
| | CTCCTGAAAGTGGCCGGGTTTAATCTGCTCATGACGCTGCGGCTGTGGTCCAGC | |
| 98 | ASSLIRGETQY | TCR G Vβ |
| | | CDR-3 |
| 99 | DTGVSQDPRHKITKRGQNVTFRCDPISEHNRLYWYRQTLGQGPEFLTYFQNEAQLEKSRLLSD | TCR G Vβ |
| | RFSAERPKGSFSTLEIQRTEQGDSAMYLCASSLIRGETQYFGPGTRLLVLE | (aa) |
| 100 | MGTSLLCWMALCLLGADHADTGVSQDPRHKITKRGQNVTFRCDPISEHNRLYWYRQTLGQGPE | TCR G Vβ + |
| | FLTYFQNEAQLEKSRLLSDRFSAERPKGSFSTLEIQRTEQGDSAMYLCASSLIRGETQYFGPG | ss (aa) |
| | TRLLVLE | |
| 101 | MGTSLLCWMALCLLGADHADTGVSQDPRHKITKRGQNVTFRCDPISEHNRLYWYRQTLGQGPE | TCR G Vβ + |
| | FLTYFQNEAQLEKSRLLSDRFSAERPKGSESTLEIQRTEQGDSAMYLCASSLIRGETQYFGPG | Cβ (aa) |
| | TRLLVLEDLKNVFPPEVAVFEPSEAEISHTQKATLVCLATGFYPDHVELSWWVNGKEVHSGVS | |
| | TDPQPLKEQPALNDSRYCLSSRLRVSATFWQNPRNHFRCQVQFYGLSENDEWTQDRAKPVTQI | |
| | VSAEAWGRADCGFTSESYQQGVLSATILYEILLGKATLYAVLVSALVLMAMVKRKDSRG | |
| 102 | ATGGGTACCAGCCTCCTCTGCTGGATGGCCCTGTGTCTCCTGGGGGCAGATCACGCAGATACT | TCR G Vβ |
| | GGAGTCTCCCAGGACCCCAGACACAAGATCACAAAGAGGGGACAGAATGTAACTTTCAGGTGT | (nt) |
| | GATCCAATTTCTGAACACAACCGCCTTTATTGGTACCGACAGACCCTGGGGCAGGGCCCAGAG | |
| | TTTCTGACTTACTTCCAGAATGAAGCTCAACTAGAAAAATCAAGGCTGCTCAGTGATCGGTTC | |
| | TCTGCAGAGAGGCCTAAGGGATCTTTCTCCACCTTGGAGATCCAGCGCACAGAGCAGGGGGAC | |
| | TCGGCCATGTATCTCTGTGCCAGCAGCTTAATCAGGGGAGAGACCCAGTACTTCGGGCCAGGC | |
| | ACGCGGCTCCTGGTGCTCGAG | |
| 103 | ATGGGTACCAGCCTCCTCTGCTGGATGGCCCTGTGTCTCCTGGGGGCAGATCACGCAGATACT | TCR G Vβ+ |
| | GGAGTCTCCCAGGACCCCAGACACAAGATCACAAAGAGGGGACAGAATGTAACTTTCAGGTGT | Cβ (nt) |
| | GATCCAATTTCTGAACACAACCGCCTTTATTGGTACCGACAGACCCTGGGGCAGGGCCCAGAG | |
| | TTTCTGACTTACTTCCAGAATGAAGCTCAACTAGAAAAATCAAGGCTGCTCAGTGATCGGTTC | |
| | TCTGCAGAGAGGCCTAAGGGATCTTTCTCCACCTTGGAGATCCAGCGCACAGAGCAGGGGGAC | |
| | TCGGCCATGTATCTCTGTGCCAGCAGCTTAATCAGGGGAGAGACCCAGTACTTCGGGCCAGGC | |
| | ACGCGGCTCCTGGTGCTCGAGGACCTGAAAAACGTGTTCCCACCCGAGGTCGCTGTGTTTGAG | |
| | CCATCAGAAGCAGAGATCTCCCACACCCAAAAGGCCACACTGGTATGCCTGGCCACAGGCTTC | |
| | TACCCCGACCACGTGGAGCTGAGCTGGTGGGTGAATGGGAAGGAGGTGCACAGTGGGGTCAGC | |
| | ACAGACCCGCAGCCCCTCAAGGAGCAGCCCGCCCTCAATGACTCCAGATACTGCCTGAGCAGC | |
| | CGCCTGAGGGTCTCGGCCACCTTCTGGCAGAACCCCCGCAACCACTTCCGCTGTCAAGTCCAG | |
| | TTCTACGGGCTCTCGGAGAATGACGAGTGGACCCAGGATAGGGCCAAACCTGTCACCCAGATC | |
| | GTCAGCGCCGAGGCCTGGGGTAGAGCAGACTGTGGCTTCACCTCCGAGTCTTACCAGCAAGGG | |
| | GTCCTGTCTGCCACCATCCTCTATGAGATCTTGCTAGGGAAGGCCACCTTGTATGCCGTGCTG | |
| | GTCAGTGCCCTCGTGCTGATGGCCATGGTCAAGAGAAAGGATTCCAGAGGCTAG | |
| 104 | ATGGAAACTCTCCTGGGAGTGTCTTTGGTGATTCTATGGCTTCAACTGGCTAGGGTGAACAGT | TCR G full |
| | CAACAGGGAGAAGAGGATCCTCAGGCCTTGAGCATCCAGGAGGGTGAAAATGCCACCATGAAC | construct nt |
| | TGCAGTTACAAAACTAGTATAAACAATTTACAGTGGTATAGACAAAATTCAGGTAGAGGCCTT | |
| | GTCCACCTAATTTTAATACGTTCAAATGAAAGAGAGAAACACAGTGGAAGATTAAGAGTCACG | |
| | CTTGACACTTCCAAGAAAAGCAGTTCCTTGTTGATCACGGCTTCCCGGGCAGCAGACACTGCT | |
| | TCTTACTTCTGTGCTGGAACTGGGGCAAACAACCTCTTCTTTGGGACTGGAACGAGACTCACC | |
| | GTTATTCCCTATATCCAGAAGCCTGACCCTGCCGTGTACCAGCTGAGAGACTCTAAATCCAGT | |
| | GACAAGTCTGTCTGCCTATTCACCGATTTTGATTCTCAAACAAATGTGTCACAAAGTAAGGAT | |
| | TCTGATGTGTATATCACAGACAAAACTGTGCTAGACATGAGGTCTATGGACTTCAAGAGCAAC | |
| | AGTGCTGTGGCCTGGAGCAACAAATCTGACTTTGCATGTGCAAACGCCTTCAACAACAGCATT | |
| | ATTCCAGAAGACACCTTCTTCCCCAGCCCAGAAAGTTCCTGTGATGTCAAGCTGGTCGAGAAA | |
| | AGCTTTGAAACAGATACGAACCTAAACTTTCAAAACCTGTCAGTGATTGGGTTCCGAATCCTC | |
| | CTCCTGAAAGTGGCCGGGTTTAATCTGCTCATGACGCTGCGGCTGTGGTCCAGCGGCTCCGGA | |
| | GCCACGAACTTCTCTCTGTTAAAGCAAGCAGGAGACGTGGAAGAAAACCCCGGTCCCATGGGT | |
| | ACCAGCCTCCTCTGCTGGATGGCCCTGTGTCTCCTGGGGGCAGATCACGCAGATACTGGAGTC | |
| | TCCCAGGACCCCAGACACAAGATCACAAAGAGGGGACAGAATGTAACTTTCAGGTGTGATCCA | |
| | ATTTCTGAACACAACCGCCTTTATTGGTACCGACAGACCCTGGGGCAGGGCCCAGAGTTTCTG | |
| | ACTTACTTCCAGAATGAAGCTCAACTAGAAAAATCAAGGCTGCTCAGTGATCGGTTCTCTGCA | |
| | GAGAGGCCTAAGGGATCTTTCTCCACCTTGGAGATCCAGCGCACAGAGCAGGGGGACTCGGCC | |
| | ATGTATCTCTGTGCCAGCAGCTTAATCAGGGGAGAGACCCAGTACTTCGGGCCAGGCACGCGG | |
| | CTCCTGGTGCTCGAGGACCTGAAAAACGTGTTCCCACCCGAGGTCGCTGTGTTTGAGCCATCA | |
| | GAAGCAGAGATCTCCCACACCCAAAAGGCCACACTGGTATGCCTGGCCACAGGCTTCTACCCC | |
| | GACCACGTGGAGCTGAGCTGGTGGGTGAATGGGAAGGAGGTGCACAGTGGGGTCAGCACAGAC | |
| | CCGCAGCCCCTCAAGGAGCAGCCCGCCCTCAATGACTCCAGATACTGCCTGAGCAGCCGCCTG | |
| | AGGGTCTCGGCCACCTTCTGGCAGAACCCCCGCAACCACTTCCGCTGTCAAGTCCAGTTCTAC | |
| | GGGCTCTCGGAGAATGACGAGTGGACCCAGGATAGGGCCAAACCTGTCACCCAGATCGTCAGC | |
| | GCCGAGGCCTGGGGTAGAGCAGACTGTGGCTTCACCTCCGAGTCTTACCAGCAAGGGGTCCTG | |
| | TCTGCCACCATCCTCTATGAGATCTTGCTAGGGAAGGCCACCTTGTATGCCGTGCTGGTCAGT | |
| | GCCCTCGTGCTGATGGCCATGGTCAAGAGAAAGGATTCCAGAGGCTAG | |
| 105 | METLLGVSLVILWLQLARVNSQQGEEDPQALSIQEGENATMNCSYKTSINNLQWYRQNSGRGL | TCR G full |
| | VHLILIRSNEREKHSGRLRVTLDTSKKSSSLLITASRAADTASYFCAGTGANNLFFGTGTRLT | construct aa |
| | VIPYIQKPDPAVYQLRDSKSSDKSVCLFTDFDSQTNVSQSKDSDVYITDKTVLDMRSMDFKSN | |
| | SAVAWSNKSDFACANAFNNSIIPEDTFFPSPESSCDVKLVEKSFETDTNLNFQNLSVIGFRIL | |
| | LLKVAGFNLLMTLRLWSSGSGATNFSLLKQAGDVEENPGPMGTSLLCWMALCLLGADHADTGV | |
| | SQDPRHKITKRGQNVTFRCDPISEHNRLYWYRQTLGQGPEFLTYFQNEAQLEKSRLLSDRFSA | |
| | ERPKGSFSTLEIQRTEQGDSAMYLCASSLIRGETQYFGPGTRLLVLEDLKNVFPPEVAVFEPS | |
| | EAEISHTQKATLVCLATGFYPDHVELSWWVNGKEVHSGVSTDPQPLKEQPALNDSRYCLSSRL | |
| | RVSATFWQNPRNHFRCQVQFYGLSENDEWTQDRAKPVTQIVSAEAWGRADCGFTSESYQQGVL | |
| | SATILYEILLGKATLYAVLVSALVLMAMVKRKDSRG | |
| 106 | AAPLAGGGADGLT | TCR H Vα |
| | | CDR-3 |
| 107 | GENVEQHPSTLSVQEGDSAVIKCTYSDSASNYFPWYKQELGKRPQLIIDIRSNVGEKKDQRIA | TCR H Vα |
| | VTLNKTAKHFSLHITETQPEDSAVYFCAAPLAGGGADGLTFGKGTHLIIQPY | (aa) |
| 108 | MSIRAVFIFLWLQLDLVNGENVEQHPSTLSVQEGDSAVIKCTYSDSASNYFPWYKQELGKRPQ | TCR H Vα + |
| | LIIDIRSNVGEKKDQRIAVTLNKTAKHFSLHITETQPEDSAVYFCAAPLAGGGADGLTFGKGT | ss (aa) |
| | HLIIQPY | |
| 109 | MSIRAVFIFLWLQLDLVNGENVEQHPSTLSVQEGDSAVIKCTYSDSASNYFPWYKQELGKRPQ | TCR H Vα + |
| | LIIDIRSNVGEKKDQRIAVTLNKTAKHFSLHITETQPEDSAVYFCAAPLAGGGADGLTFGKGT | Cα (aa) |
| | HLIIQPYIQNPDPAVYQLRDSKSSDKSVCLFTDFDSQTNVSQSKDSDVYITDKTVLDMRSMDF | |
| | KSNSAVAWSNKSDFACANAFNNSIIPEDTFFPSPESSCDVKLVEKSFETDTNLNFQNLSVIGF | |
| | RILLLKVAGFNLLMTLRLWSS | |
| 110 | ATGTCCATTCGAGCTGTATTTATATTCCTGTGGCTGCAGCTGGACTTGGTGAATGGAGAGAAT | TCR H Vα |
| | GTGGAGCAGCATCCTTCAACCCTGAGTGTCCAGGAGGGAGACAGCGCTGTTATCAAGTGTACT | (nt) |
| | TATTCAGACAGTGCCTCAAACTACTTCCCTTGGTATAAGCAAGAACTTGGAAAAAGACCTCAG | |
| | CTTATTATAGACATTCGTTCAAATGTGGGCGAAAAGAAAGACCAACGAATTGCTGTTACATTG | |
| | AACAAGACAGCCAAACATTTCTCCCTGCACATCACAGAGACCCAACCTGAAGACTCGGCTGTC | |
| | TACTTCTGTGCAGCACCTTTGGCAGGAGGAGGTGCTGACGGACTCACCTTTGGCAAAGGGACT | |
| | CATCTAATCATCCAGCCCTAT | |
| 111 | ATGTCCATTCGAGCTGTATTTATATTCCTGTGGCTGCAGCTGGACTTGGTGAATGGAGAGAAT | TCR H Vα + |
| | GTGGAGCAGCATCCTTCAACCCTGAGTGTCCAGGAGGGAGACAGCGCTGTTATCAAGTGTACT | Cα (nt) |
| | TATTCAGACAGTGCCTCAAACTACTTCCCTTGGTATAAGCAAGAACTTGGAAAAAGACCTCAG | |
| | CTTATTATAGACATTCGTTCAAATGTGGGCGAAAAGAAAGACCAACGAATTGCTGTTACATTG | |
| | AACAAGACAGCCAAACATTTCTCCCTGCACATCACAGAGACCCAACCTGAAGACTCGGCTGTC | |
| | TACTTCTGTGCAGCACCTTTGGCAGGAGGAGGTGCTGACGGACTCACCTTTGGCAAAGGGACT | |
| | CATCTAATCATCCAGCCCTATATCCAGAACCCTGACCCTGCCGTGTACCAGCTGAGAGACTCT | |
| | AAATCCAGTGACAAGTCTGTCTGCCTATTCACCGATTTTGATTCTCAAACAAATGTGTCACAA | |
| | AGTAAGGATTCTGATGTGTATATCACAGACAAAACTGTGCTAGACATGAGGTCTATGGACTTC | |
| | AAGAGCAACAGTGCTGTGGCCTGGAGCAACAAATCTGACTTTGCATGTGCAAACGCCTTCAAC | |
| | AACAGCATTATTCCAGAAGACACCTTCTTCCCCAGCCCAGAAAGTTCCTGTGATGTCAAGCTG | |
| | GTCGAGAAAAGCTTTGAAACAGATACGAACCTAAACTTTCAAAACCTGTCAGTGATTGGGTTC | |
| | CGAATCCTCCTCCTGAAAGTGGCCGGGTTTAATCTGCTCATGACGCTGCGGCTGTGGTCCAGC | |
| 112 | ASSTTLITGYT | TCR H Vβ |
| | | CDR-3 |
| 113 | DTGVSQDPRHKITKRGQNVTFRCDPISEHNRLYWYRQTLGQGPEFLTYFQNEAQLEKSRLLSD | TCR H Vβ |
| | RFSAERPKGSFSTLEIQRTEQGDSAMYLCASSTTLITGYTFGSGTRLTVVE | (aa) |
| 114 | MGTSLLCWMALCLLGADHADTGVSQDPRHKITKRGQNVTFRCDPISEHNRLYWYRQTLGQGPE | TCR H Vβ + |
| | FLTYFQNEAQLEKSRLLSDRFSAERPKGSFSTLEIQRTEQGDSAMYLCASSTTLITGYTFGSG | ss (aa) |
| | TRLTVVE | |
| 115 | MGTSLLCWMALCLLGADHADTGVSQDPRHKITKRGQNVTFRCDPISEHNRLYWYRQTLGQGPE | TCR H Vβ + |
| | FLTYFQNEAQLEKSRLLSDRFSAERPKGSFSTLEIQRTEQGDSAMYLCASSTTLITGYTFGSG | Cβ (aa) |
| | TRLTVVEDLNKVFPPEVAVFEPSEAEISHTQKATLVCLATGFYPDHVELSWWVNGKEVHSGVS | |
| | TDPQPLKEQPALNDSRYCLSSRLRVSATFWQNPRNHFRCQVQFYGLSENDEWTQDRAKPVTQI | |
| | VSAEAWGRADCGFTSESYQQGVLSATILYEILLGKATLYAVLVSALVLMAMVKRKDSRG | |
| 116 | ATGGGTACCAGCCTCCTCTGCTGGATGGCCCTGTGTCTCCTGGGGGCAGATCACGCAGATACT | TCR H Vβ |
| | GGAGTCTCCCAGGACCCCAGACACAAGATCACAAAGAGGGGACAGAATGTAACTTTCAGGTGT | (nt) |
| | GATCCAATTTCTGAACACAACCGCCTTTATTGGTACCGACAGACCCTGGGGCAGGGCCCAGAG | |
| | TTTCTGACTTACTTCCAGAATGAAGCTCAACTAGAAAAATCAAGGCTGCTCAGTGATCGGTTC | |
| | TCTGCAGAGAGGCCTAAGGGATCTTTCTCCACCTTGGAGATCCAGCGCACAGAGCAGGGGGAC | |
| | TCGGCCATGTATCTCTGTGCCAGCAGCACGACTCTTATAACGGGCTACACCTTCGGTTCGGGG | |
| | ACCAGGTTAACCGTTGTAGAG | |
| 117 | ATGGGTACCAGCCTCCTCTGCTGGATGGCCCTGTGTCTCCTGGGGGCAGATCACGCAGATACT | TCR H Vβ + |
| | GGAGTCTCCCAGGACCCCAGACACAAGATCACAAAGAGGGGACAGAATGTAACTTTCAGGTGT | Cβ (nt) |
| | GATCCAATTTCTGAACACAACCGCCTTTATTGGTACCGACAGACCCTGGGGCAGGGCCCAGAG | |
| | TTTCTGACTTACTTCCAGAATGAAGCTCAACTAGAAAAATCAAGGCTGCTCAGTGATCGGTTC | |
| | TCTGCAGAGAGGCCTAAGGGATCTTTCTCCACCTTGGAGATCCAGCGCACAGAGCAGGGGGAC | |
| | TCGGCCATGTATCTCTGTGCCAGCAGCACGACTCTTATAACGGGCTACACCTTCGGTTCGGGG | |
| | ACCAGGTTAACCGTTGTAGAGGACCTGAACAAGGTGTTCCCACCCGAGGTCGCTGTGTTTGAG | |
| | CCATCAGAAGCAGAGATCTCCCACACCCAAAAGGCCACACTGGTATGCCTGGCCACAGGCTTC | |
| | TACCCCGACCACGTGGAGCTGAGCTGGTGGGTGAATGGGAAGGAGGTGCACAGTGGGGTCAGC | |
| | ACAGACCCGCAGCCCCTCAAGGAGCAGCCCGCCCTCAATGACTCCAGATACTGCCTGAGCAGC | |
| | CGCCTGAGGGTCTCGGCCACCTTCTGGCAGAACCCCCGCAACCACTTCCGCTGTCAAGTCCAG | |
| | TTCTACGGGCTCTCGGAGAATGACGAGTGGACCCAGGATAGGGCCAAACCTGTCACCCAGATC | |
| | GTCAGCGCCGAGGCCTGGGGTAGAGCAGACTGTGGCTTCACCTCCGAGTCTTACCAGCAAGGG | |
| | GTCCTGTCTGCCACCATCCTCTATGAGATCTTGCTAGGGAAGGCCACCTTGTATGCCGTGCTG | |
| | GTCAGTGCCCTCGTGCTGATGGCCATGGTCAAGAGAAAGGATTCCAGAGGCTAG | |
| 118 | ATGTCCATTCGAGCTGTATTTATATTCCTGTGGCTGCAGCTGGACTTGGTGAATGGAGAGAAT | TCR H full |
| | GTGGAGCAGCATCCTTCAACCCTGAGTGTCCAGGAGGGAGACAGCGCTGTTATCAAGTGTACT | construct nt |
| | TATTCAGACAGTGCCTCAAACTACTTCCCTTGGTATAAGCAAGAACTTGGAAAAAGACCTCAG | |
| | CTTATTATAGACATTCGTTCAAATGTGGGCGAAAAGAAAGACCAACGAATTGCTGTTACATTG | |
| | AACAAGACAGCCAAACATTTCTCCCTGCACATCACAGAGACCCAACCTGAAGACTCGGCTGTC | |
| | TACTTCTGTGCAGCACCTTTGGCAGGAGGAGGTGCTGACGGACTCACCTTTGGCAAAGGGACT | |
| | CATCTAATCATCCAGCCCTATATCCAGAACCCTGACCCTGCCGTGTACCAGCTGAGAGACTCT | |
| | AAATCCAGTGACAAGTCTGTCTGCCTATTCACCGATTTTGATTCTCAAACAAATGTGTCACAA | |
| | AGTAAGGATTCTGATGTGTATATCACAGACAAAACTGTGCTAGACATGAGGTCTATGGACTTC | |
| | AAGAGCAACAGTGCTGTGGCCTGGAGCAACAAATCTGACTTTGCATGTGCAAACGCCTTCAAC | |
| | AACAGCATTATTCCAGAAGACACCTTCTTCCCCAGCCCAGAAAGTTCCTGTGATGTCAAGCTG | |
| | GTCGAGAAAAGCTTTGAAACAGATACGAACCTAAACTTTCAAAACCTGTCAGTGATTGGGTTC | |
| | CGAATCCTCCTCCTGAAAGTGGCCGGGTTTAATCTGCTCATGACGCTGCGGCTGTGGTCCAGC | |
| | GGCTCCGGAGCCACGAACTTCTCTCTGTTAAAGCAAGCAGGAGACGTGGAAGAAAACCCCGGT | |
| | CCCATGGGTACCAGCCTCCTCTGCTGGATGGCCCTGTGTCTCCTGGGGGCAGATCACGCAGAT | |
| | ACTGGAGTCTCCCAGGACCCCAGACACAAGATCACAAAGAGGGGACAGAATGTAACTTTCAGG | |
| | TGTGATCCAATTTCTGAACACAACCGCCTTTATTGGTACCGACAGACCCTGGGGCAGGGCCCA | |
| | GAGTTTCTGACTTACTTCCAGAATGAAGCTCAACTAGAAAAATCAAGGCTGCTCAGTGATCGG | |
| | TTCTCTGCAGAGAGGCCTAAGGGATCTTTCTCCACCTTGGAGATCCAGCGCACAGAGCAGGGG | |
| | GACTCGGCCATGTATCTCTGTGCCAGCAGCACGACTCTTATAACGGGCTACACCTTCGGTTCG | |
| | GGGACCAGGTTAACCGTTGTAGAGGACCTGAACAAGGTGTTCCCACCCGAGGTCGCTGTGTTT | |
| | GAGCCATCAGAAGCAGAGATCTCCCACACCCAAAAGGCCACACTGGTATGCCTGGCCACAGGC | |
| | TTCTACCCCGACCACGTGGAGCTGAGCTGGTGGGTGAATGGGAAGGAGGTGCACAGTGGGGTC | |
| | AGCACAGACCCGCAGCCCCTCAAGGAGCAGCCCGCCCTCAATGACTCCAGATACTGCCTGAGC | |
| | AGCCGCCTGAGGGTCTCGGCCACCTTCTGGCAGAACCCCCGCAACCACTTCCGCTGTCAAGTC | |
| | CAGTTCTACGGGCTCTCGGAGAATGACGAGTGGACCCAGGATAGGGCCAAACCTGTCACCCAG | |
| | ATCGTCAGCGCCGAGGCCTGGGGTAGAGCAGACTGTGGCTTCACCTCCGAGTCTTACCAGCAA | |
| | GGGGTCCTGTCTGCCACCATCCTCTATGAGATCTTGCTAGGGAAGGCCACCTTGTATGCCGTG | |
| | CTGGTCAGTGCCCTCGTGCTGATGGCCATGGTCAAGAGAAAGGATTCCAGAGGCTAG | |
| 119 | MSIRAVFIFLWLQLDLVNGENVEQHPSTLSVQEGDSAVIKCTYSDSASNYFPWYKQELGKRPQ | TCR H full |
| | LIIDIRSNVGEKKDQRIAVTLNKTAKHFSLHITETQPEDSAVYFCAAPLAGGGADGLTFGKGT | construct aa |
| | HLIIQPYIQNPDPAVYQLRDSKSSDKSVCLFTDFDSQTNVSQSKDSDVYITDKTVLDMRSMDF | |
| | KSNSAVAWSNKSDFACANAFNNSIIPEDTFFPSPESSCDVKLVEKSFETDTNLNFQNLSVIGF | |
| | RILLLKVAGFNLLMTLRLWSSGSGATNFSLLKQAGDVEENPGPMGTSLLCWMALCLLGADHAD | |
| | TGVSQDPRHKITKRGQNVTFRCDPISEHNRLYWYRQTLGQGPEFLTYFQNEAQLEKSRLLSDR | |
| | FSAERPKGSFSTLEIQRTEQGDSAMYLCASSTTLITGYTFGSGTRLTVVEDLNKVFPPEVAVF | |
| | EPSEAEISHTQKATLVCLATGFYPDHVELSWWVNGKEVHSGVSTDPQPLKEQPALNDSRYCLS | |
| | SRLRVSATFWQNPRNHFRCQVQFYGLSENDEWTQDRAKPVTQIVSAEAWGRADCGFTSESYQQ | |
| | GVLSATILYEILLGKATLYAVLVSALVLMAMVKRKDSRG | |
| 120 | AVRGTTSGTYKYI | TCR I Vα |
| | | CDR-3 |
| 121 | KQEVTQIPAALSVPEGENLVLNCSFTDSAIYNLQWFRQDPGKGLTSLLLIQSSQREQTSGRLN | TCR I Vα (aa) |
| | ASLDKSSGRSTLYIAASQPGDSATYLCAVRGTTSGTYKYIFGTGTRLKVLAN | |
| 122 | METLLGLLILWLQLQWVSSKQEVTQIPAALSVPEGENLVLNCSFTDSAIYNLQWFRQDPGKGL | TCR I Vα + ss |
| | TSLLLIQSSQREQTSGRLNASLDKSSGRSTLYIAASQPGDSATYLCAVRGTTSGTYKYIFGTG | (aa) |
| | TRLKVLAN | |
| 123 | METLLGLLILWLQLQWVSSKQEVTQIPAALSVPEGENLVLNCSFTDSAIYNLQWFRQDPGKGL | TCR I Vα + |
| | TSLLLIQSSQREQTSGRLNASLDKSSGRSTLYIAASQPGDSATYLCAVRGTTSGTYKYIFGTG | Cα (aa) |
| | TRLKVLANIQNPDPAVYQLRDSKSSDKSVCLFTDFDSQTNVSQSKDSDVYITDKTVLDMRSMD | |
| | FKSNSAVAWSNKSDFACANAFNNSIIPEDTFFPSPESSCDVKLVEKSFETDTNLNFQNLSVIG | |
| | FRILLLKVAGFNLLMTLRLWSS | |
| 124 | ATGGAGACCCTCTTGGGCCTGCTTATCCTTTGGCTGCAGCTGCAATGGGTGAGCAGCAAACAG | TCR I Vα (nt) |
| | GAGGTGACGCAGATTCCTGCAGCTCTGAGTGTCCCAGAAGGAGAAAACTTGGTTCTCAACTGC | |
| | AGTTTCACTGATAGCGCTATTTACAACCTCCAGTGGTTTAGGCAGGACCCTGGGAAAGGTCTC | |
| | ACATCTCTGTTGCTTATTCAGTCAAGTCAGAGAGAGCAAACAAGTGGAAGACTTAATGCCTCG | |
| | CTGGATAAATCATCAGGACGTAGTACTTTATACATTGCAGCTTCTCAGCCTGGTGACTCAGCC | |
| | ACCTACCTCTGTGCTGTTCGTGGGACTACCTCAGGAACCTACAAATACATCTTTGGAACAGGC | |
| | ACCAGGCTGAAGGTTTTAGCAAAT | |
| 125 | ATGGAGACCCTCTTGGGCCTGCTTATCCTTTGGCTGCAGCTGCAATGGGTGAGCAGCAAACAG | TCR I Vα + |
| | GAGGTGACGCAGATTCCTGCAGCTCTGAGTGTCCCAGAAGGAGAAAACTTGGTTCTCAACTGC | Cα (nt) |
| | AGTTTCACTGATAGCGCTATTTACAACCTCCAGTGGTTTAGGCAGGACCCTGGGAAAGGTCTC | |
| | ACATCTCTGTTGCTTATTCAGTCAAGTCAGAGAGAGCAAACAAGTGGAAGACTTAATGCCTCG | |
| | CTGGATAAATCATCAGGACGTAGTACTTTATACATTGCAGCTTCTCAGCCTGGTGACTCAGCC | |
| | ACCTACCTCTGTGCTGTTCGTGGGACTACCTCAGGAACCTACAAATACATCTTTGGAACAGGC | |
| | ACCAGGCTGAAGGTTTTAGCAAATATCCAGAACCCTGACCCTGCCGTGTACCAGCTGAGAGAC | |
| | TCTAAATCCAGTGACAAGTCTGTCTGCCTATTCACCGATTTTGATTCTCAAACAAATGTGTCA | |
| | CAAAGTAAGGATTCTGATGTGTATATCACAGACAAAACTGTGCTAGACATGAGGTCTATGGAC | |
| | TTCAAGAGCAACAGTGCTGTGGCCTGGAGCAACAAATCTGACTTTGCATGTGCAAACGCCTTC | |
| | AACAACAGCATTATTCCAGAAGACACCTTCTTCCCCAGCCCAGAAAGTTCCTGTGATGTCAAG | |
| | CTGGTCGAGAAAAGCTTTGAAACAGATACGAACCTAAACTTTCAAAACCTGTCAGTGATTGGG | |
| | TTCCGAATCCTCCTCCTGAAAGTGGCCGGGTTTAATCTGCTCATGACGCTGCGGCTGTGGTCC | |
| | AGC | |
| 126 | ASSFLAGETQY | TCR I Vβ |
| | | CDR-3 |
| 127 | DTGVSQDPRHKITKRGQNVTFRCDPISEHNRLYWYRQTLGQGPEFLTYFQNEAQLEKSRLLSD | TCR I Vβ (aa) |
| | RFSAERPKGSFSTLEIQRTEQGDSAMYLCASSFLAGETQYFGPGTRLLVLE | |
| 128 | MGTSLLCWMALCLLGADHADTGVSQDPRHKITKRGQNVTFRCDPISEHNRLYWYRQTLGQGPE | TCR I Vβ + ss |
| | FLTYFQNEAQLEKSRLLSDRFSAERPKGSFSTLEIQRTEQGDSAMYLCASSFLAGETQYFGPG | (aa) |
| | TRLLVLE | |
| 129 | MGTSLLCWMALCLLGADHADTGVSQDPRHKITKRGQNVTFRCDPISEHNRLYWYRQTLGQGPE | TCR I Vβ + |
| | FLTYFQNEAQLEKSRLLSDRFSAERPKGSFSTLEIQRTEQGDSAMYLCASSFLAGETQYFGPG | Cβ (aa) |
| | TRLLVLEDLKNVFPPEVAVFEPSEAEISHTQKATLVCLATGFYPDHVELSWWVNGKEVHSGVS | |
| | TDPQPLKEQPALNDSRYCLSSRLRVSATFWQNPRNHFRCQVQFYGLSENDEWTQDRAKPVTQI | |
| | VSAEAWGRADCGFTSESYQQGVLSATILYEILLGKATLYAVLVSALVLMAMVKRKDSRG | |
| 130 | ATGGGTACCAGCCTCCTCTGCTGGATGGCCCTGTGTCTCCTGGGGGCAGATCACGCAGATACT | TCR I Vβ (nt) |
| | GGAGTCTCCCAGGACCCCAGACACAAGATCACAAAGAGGGGACAGAATGTAACTTTCAGGTGT | |
| | GATCCAATTTCTGAACACAACCGCCTTTATTGGTACCGACAGACCCTGGGGCAGGGCCCAGAG | |
| | TTTCTGACTTACTTCCAGAATGAAGCTCAACTAGAAAAATCAAGGCTGCTCAGTGATCGGTTC | |
| | TCTGCAGAGAGGCCTAAGGGATCTTTCTCCACCTTGGAGATCCAGCGCACAGAGCAGGGGGAC | |
| | TCGGCCATGTATCTCTGTGCCAGCAGCTTCCTAGCGGGAGAGACCCAGTACTTCGGGCCAGGC | |
| | ACGCGGCTCCTGGTGCTCGAG | |
| 131 | ATGGGTACCAGCCTCCTCTGCTGGATGGCCCTGTGTCTCCTGGGGGCAGATCACGCAGATACT | TCR I Vβ + |
| | GGAGTCTCCCAGGACCCCAGACACAAGATCACAAAGAGGGGACAGAATGTAACTTTCAGGTGT | Cβ (nt) |
| | GATCCAATTTCTGAACACAACCGCCTTTATTGGTACCGACAGACCCTGGGGCAGGGCCCAGAG | |
| | TTTCTGACTTACTTCCAGAATGAAGCTCAACTAGAAAAATCAAGGCTGCTCAGTGATCGGTTC | |
| | TCTGCAGAGAGGCCTAAGGGATCTTTCTCCACCTTGGAGATCCAGCGCACAGAGCAGGGGGAC | |
| | TCGGCCATGTATCTCTGTGCCAGCAGCTTCCTAGCGGGAGAGACCCAGTACTTCGGGCCAGGC | |
| | ACGCGGCTCCTGGTGCTCGAGGACCTGAAAAACGTGTTCCCACCCGAGGTCGCTGTGTTTGAG | |
| | CCATCAGAAGCAGAGATCTCCCACACCCAAAAGGCCACACTGGTATGCCTGGCCACAGGCTTC | |
| | TACCCCGACCACGTGGAGCTGAGCTGGTGGGTGAATGGGAAGGAGGTGCACAGTGGGGTCAGC | |
| | ACAGACCCGCAGCCCCTCAAGGAGCAGCCCGCCCTCAATGACTCCAGATACTGCCTGAGCAGC | |
| | CGCCTGAGGGTCTCGGCCACCTTCTGGCAGAACCCCCGCAACCACTTCCGCTGTCAAGTCCAG | |
| | TTCTACGGGCTCTCGGAGAATGACGAGTGGACCCAGGATAGGGCCAAACCTGTCACCCAGATC | |
| | GTCAGCGCCGAGGCCTGGGGTAGAGCAGACTGTGGCTTCACCTCCGAGTCTTACCAGCAAGGG | |
| | GTCCTGTCTGCCACCATCCTCTATGAGATCTTGCTAGGGAAGGCCACCTTGTATGCCGTGCTG | |
| | GTCAGTGCCCTCGTGCTGATGGCCATGGTCAAGAGAAAGGATTCCAGAGGCTAG | |
| 132 | ATGGAGACCCTCTTGGGCCTGCTTATCCTTTGGCTGCAGCTGCAATGGGTGAGCAGCAAACAG | TCR I full |
| | GAGGTGACGCAGATTCCTGCAGCTCTGAGTGTCCCAGAAGGAGAAAACTTGGTTCTCAACTGC | construct nt |
| | AGTTTCACTGATAGCGCTATTTACAACCTCCAGTGGTTTAGGCAGGACCCTGGGAAAGGTCTC | |
| | ACATCTCTGTTGCTTATTCAGTCAAGTCAGAGAGAGCAAACAAGTGGAAGACTTAATGCCTCG | |
| | CTGGATAAATCATCAGGACGTAGTACTTTATACATTGCAGCTTCTCAGCCTGGTGACTCAGCC | |
| | ACCTACCTCTGTGCTGTTCGTGGGACTACCTCAGGAACCTACAAATACATCTTTGGAACAGGC | |
| | ACCAGGCTGAAGGTTTTAGCAAATATCCAGAACCCTGACCCTGCCGTGTACCAGCTGAGAGAC | |
| | TCTAAATCCAGTGACAAGTCTGTCTGCCTATTCACCGATTTTGATTCTCAAACAAATGTGTCA | |
| | CAAAGTAAGGATTCTGATGTGTATATCACAGACAAAACTGTGCTAGACATGAGGTCTATGGAC | |
| | TTCAAGAGCAACAGTGCTGTGGCCTGGAGCAACAAATCTGACTTTGCATGTGCAAACGCCTTC | |
| | AACAACAGCATTATTCCAGAAGACACCTTCTTCCCCAGCCCAGAAAGTTCCTGTGATGTCAAG | |
| | CTGGTCGAGAAAAGCTTTGAAACAGATACGAACCTAAACTTTCAAAACCTGTCAGTGATTGGG | |
| | TTCCGAATCCTCCTCCTGAAAGTGGCCGGGTTTAATCTGCTCATGACGCTGCGGCTGTGGTCC | |
| | AGCGGCTCCGGAGCCACGAACTTCTCTCTGTTAAAGCAAGCAGGAGACGTGGAAGAAAACCCC | |
| | GGTCCCATGGGTACCAGCCTCCTCTGCTGGATGGCCCTGTGTCTCCTGGGGGCAGATCACGCA | |
| | GATACTGGAGTCTCCCAGGACCCCAGACACAAGATCACAAAGAGGGGACAGAATGTAACTTTC | |
| | AGGTGTGATCCAATTTCTGAACACAACCGCCTTTATTGGTACCGACAGACCCTGGGGCAGGGC | |
| | CCAGAGTTTCTGACTTACTTCCAGAATGAAGCTCAACTAGAAAAATCAAGGCTGCTCAGTGAT | |
| | CGGTTCTCTGCAGAGAGGCCTAAGGGATCTTTCTCCACCTTGGAGATCCAGCGCACAGAGCAG | |
| | GGGGACTCGGCCATGTATCTCTGTGCCAGCAGCTTCCTAGCGGGAGAGACCCAGTACTTCGGG | |
| | CCAGGCACGCGGCTCCTGGTGCTCGAGGACCTGAAAAACGTGTTCCCACCCGAGGTCGCTGTG | |
| | TTTGAGCCATCAGAAGCAGAGATCTCCCACACCCAAAAGGCCACACTGGTATGCCTGGCCACA | |
| | GGCTTCTACCCCGACCACGTGGAGCTGAGCTGGTGGGTGAATGGGAAGGAGGTGCACAGTGGG | |
| | GTCAGCACAGACCCGCAGCCCCTCAAGGAGCAGCCCGCCCTCAATGACTCCAGATACTGCCTG | |
| | AGCAGCCGCCTGAGGGTCTCGGCCACCTTCTGGCAGAACCCCCGCAACCACTTCCGCTGTCAA | |
| | GTCCAGTTCTACGGGCTCTCGGAGAATGACGAGTGGACCCAGGATAGGGCCAAACCTGTCACC | |
| | CAGATCGTCAGCGCCGAGGCCTGGGGTAGAGCAGACTGTGGCTTCACCTCCGAGTCTTACCAG | |
| | CAAGGGGTCCTGTCTGCCACCATCCTCTATGAGATCTTGCTAGGGAAGGCCACCTTGTATGCC | |
| | GTGCTGGTCAGTGCCCTCGTGCTGATGGCCATGGTCAAGAGAAAGGATTCCAGAGGCTAG | |
| 133 | METLLGLLILWLQLQWVSSKQEVTQIPAALSVPEGENLVLNCSFTDSAIYNLQWFRQDPGKGL | TCR I full |
| | TSLLLIQSSQREQTSGRLNASLDKSSGRSTLYIAASQPGDSATYLCAVRGTTSGTYKYIFGTG | construct aa |
| | TRLKVLANIQNPDPAVYQLRDSKSSDKSVCLFTDFDSQTNVSQSKDSDVYITDKTVLDMRSMD | |
| | FKSNSAVAWSNKSDFACANAFNNSIIPEDTFFPSPESSCDVKLVEKSFETDTNLNFQNLSVIG | |
| | FRILLLKVAGFNLLMTLRLWSSGSGATNFSLLKQAGDVEENPGPMGTSLLCWMALCLLGADHA | |
| | DTGVSQDPRHKITKRGQNVTFRCDPISEHNRLYWYRQTLGQGPEFLTYFQNEAQLEKSRLLSD | |
| | RFSAERPKGSFSTLEIQRTEQGDSAMYLCASSFLAGETQYFGPGTRLLVLEDLKNVFPPEVAV | |
| | FEPSEAEISHTQKATLVCLATGFYPDHVELSWWVNGKEVHSGVSTDPQPLKEQPALNDSRYCL | |
| | SSRLRVSATFWQNPRNHFRCQVQFYGLSENDEWTQDRAKPVTQIVSAEAWGRADCGFTSESYQ | |
| | QGVLSATILYEILLGKATLYAVLVSALVLMAMVKRKDSRG | |
| 134 | NSAFQY | TCR J Vα |
| | | CDR-1 |
| 135 | TYSSGN | TCR J Vα |
| | | CDR-2 |
| 136 | AMRATSGTYKYI | TCR J Vα |
| | | CDR-3 |
| 137 | QKEVEQDPGPLSVPEGAIVSLNCTYSNSAFQYFMWYRQYSRKGPELLMYTYSSGNKEDGRFTA | TCR J Vα |
| | QVDKSSKYISLFIRDSQPSDSATYLCAMRATSGTYKYIFGTGTRLKVLAN | (aa) |
| 138 | MKSLRVLLVILWLQLSWVWSQQKEVEQDPGPLSVPEGAIVSLNCTYSNSAFQYFMWYRQYSRK | TCR J Vα + ss |
| | GPELLMYTYSSGNKEDGRFTAQVDKSSKYISLFIRDSQPSDSATYLCAMRATSGTYKYIFGTG | (aa) |
| | TRLKVLAN | |
| 139 | MKSLRVLLVILWLQLSWVWSQQKEVEQDPGPLSVPEGAIVSLNCTYSNSAFQYFMWYRQYSRK | TCR J Vα + |
| | GPELLMYTYSSGNKEDGRFTAQVDKSSKYISLFIRDSQPSDSATYLCAMRATSGTYKYIFGTG | Cα (aa) |
| | TRLKVLANIQNPDPAVYQLRDSKSSDKSVCLFTDFDSQTNVSQSKDSDVYITDKTVLDMRSMD | |
| | FKSNSAVAWSNKSDFACANAFNNSIIPEDTFFPSPESSCDVKLVEKSFETDTNLNFQNLSVIG | |
| | FRILLLKVAGFNLLMTLRLWSS | |
| 140 | ATGAAATCCTTGAGAGTTTTACTGGTGATCCTGTGGCTTCAGTTAAGCTGGGTTTGGAGCCAA | TCR J Vα (nt) |
| | CAGAAGGAGGTGGAGCAGGATCCTGGACCACTCAGTGTTCCAGAGGGAGCCATTGTTTCTCTC | |
| | AACTGCACTTACAGCAACAGTGCTTTTCAATACTTCATGTGGTACAGACAGTATTCCAGAAAA | |
| | GGCCCTGAGTTGCTGATGTACACATACTCCAGTGGTAACAAAGAAGATGGAAGGTTTACAGCA | |
| | CAGGTCGATAAATCCAGCAAGTATATCTCCTTGTTCATCAGAGACTCACAGCCCAGTGATTCA | |
| | GCCACCTACCTCTGTGCAATGAGGGCTACCTCAGGAACCTACAAATACATCTTTGGAACAGGC | |
| | ACCAGGCTGAAGGTTTTAGCAAAT | |
| 141 | ATGAAATCCTTGAGAGTTTTACTGGTGATCCTGTGGCTTCAGTTAAGCTGGGTTTGGAGCCAA | TCR J Vα + |
| | CAGAAGGAGGTGGAGCAGGATCCTGGACCACTCAGTGTTCCAGAGGGAGCCATTGTTTCTCTC | Cα (nt) |
| | AACTGCACTTACAGCAACAGTGCTTTTCAATACTTCATGTGGTACAGACAGTATTCCAGAAAA | |
| | GGCCCTGAGTTGCTGATGTACACATACTCCAGTGGTAACAAAGAAGATGGAAGGTTTACAGCA | |
| | CAGGTCGATAAATCCAGCAAGTATATCTCCTTGTTCATCAGAGACTCACAGCCCAGTGATTCA | |
| | GCCACCTACCTCTGTGCAATGAGGGCTACCTCAGGAACCTACAAATACATCTTTGGAACAGGC | |
| | ACCAGGCTGAAGGTTTTAGCAAATATCCAGAACCCTGACCCTGCCGTGTACCAGCTGAGAGAC | |
| | TCTAAATCCAGTGACAAGTCTGTCTGCCTATTCACCGATTTTGATTCTCAAACAAATGTGTCA | |
| | CAAAGTAAGGATTCTGATGTGTATATCACAGACAAAACTGTGCTAGACATGAGGTCTATGGAC | |
| | TTCAAGAGCAACAGTGCTGTGGCCTGGAGCAACAAATCTGACTTTGCATGTGCAAACGCCTTC | |
| | AACAACAGCATTATTCCAGAAGACACCTTCTTCCCCAGCCCAGAAAGTTCCTGTGATGTCAAG | |
| | CTGGTCGAGAAAAGCTTTGAAACAGATACGAACCTAAACTTTCAAAACCTGTCAGTGATTGGG | |
| | TTCCGAATCCTCCTCCTGAAAGTGGCCGGGTTTAATCTGCTCATGACGCTGCGGCTGTGGTCC | |
| | AGC | |
| 142 | AVPGGSSYNEQF | TCR J Vβ |
| | | CDR-3 |
| 143 | DTGVSQDPRHKITKRGQNVTFRCDPISEHNRLYWYRQTLGQGPEFLTYFQNEAQLEKSRLLSD | TCR J Vβ |
| | RFSAERPKGSFSTLEIQRTEQGDSAMYLCAVPGGSSYNEQFFGPGTRLTVLE | (aa) |
| 144 | MGTSLLCWMALCLLGADHADTGVSQDPRHKITKRGQNVTFRCDPISEHNRLYWYRQTLGQGPE | TCR J Vβ + ss |
| | FLTYFQNEAQLEKSRLLSDRFSAERPKGSFSTLEIQRTEQGDSAMYLCAVPGGSSYNEQFFGP | (aa) |
| | GTRLTVLE | |
| 145 | MGTSLLCWMALCLLGADHADTGVSQDPRHKITKRGQNVTFRCDPISEHNRLYWYRQTLGQGPE | TCR J Vβ + |
| | FLTYFQNEAQLEKSRLLSDRFSAERPKGSFSTLEIQRTEQGDSAMYLCAVPGGSSYNEQFFGP | Cβ (aa) |
| | GTRLTVLEDLKNVFPPEVAVFEPSEAEISHTQKATLVCLATGFYPDHVELSWWVNGKEVHSGV | |
| | STDPQPLKEQPALNDSRYCLSSRLRVSATFWQNPRNHERCQVQFYGLSENDEWTQDRAKPVTQ | |
| | IVSAEAWGRADCGFTSESYQQGVLSATILYEILLGKATLYAVLVSALVLMAMVKRKDSRG | |
| 146 | ATGGGTACCAGCCTCCTCTGCTGGATGGCCCTGTGTCTCCTGGGGGCAGATCACGCAGATACT | TCR J Vβ (nt) |
| | GGAGTCTCCCAGGACCCCAGACACAAGATCACAAAGAGGGGACAGAATGTAACTTTCAGGTGT | |
| | GATCCAATTTCTGAACACAACCGCCTTTATTGGTACCGACAGACCCTGGGGCAGGGCCCAGAG | |
| | TTTCTGACTTACTTCCAGAATGAAGCTCAACTAGAAAAATCAAGGCTGCTCAGTGATCGGTTC | |
| | TCTGCAGAGAGGCCTAAGGGATCTTTCTCCACCTTGGAGATCCAGCGCACAGAGCAGGGGGAC | |
| | TCGGCCATGTATCTCTGTGCCGTCCCTGGGGGGAGCTCCTACAATGAGCAGTTCTTCGGGCCA | |
| | GGGACACGGCTCACCGTGCTAGAG | |
| 147 | ATGGGTACCAGCCTCCTCTGCTGGATGGCCCTGTGTCTCCTGGGGGCAGATCACGCAGATACT | TCR J Vβ + |
| | GGAGTCTCCCAGGACCCCAGACACAAGATCACAAAGAGGGGACAGAATGTAACTTTCAGGTGT | Cß (nt) |
| | GATCCAATTTCTGAACACAACCGCCTTTATTGGTACCGACAGACCCTGGGGCAGGGCCCAGAG | |
| | TTTCTGACTTACTTCCAGAATGAAGCTCAACTAGAAAAATCAAGGCTGCTCAGTGATCGGTTC | |
| | TCTGCAGAGAGGCCTAAGGGATCTTTCTCCACCTTGGAGATCCAGCGCACAGAGCAGGGGGAC | |
| | TCGGCCATGTATCTCTGTGCCGTCCCTGGGGGGAGCTCCTACAATGAGCAGTTCTTCGGGCCA | |
| | GGGACACGGCTCACCGTGCTAGAGGACCTGAAAAACGTGTTCCCACCCGAGGTCGCTGTGTTT | |
| | GAGCCATCAGAAGCAGAGATCTCCCACACCCAAAAGGCCACACTGGTATGCCTGGCCACAGGC | |
| | TTCTACCCCGACCACGTGGAGCTGAGCTGGTGGGTGAATGGGAAGGAGGTGCACAGTGGGGTC | |
| | AGCACAGACCCGCAGCCCCTCAAGGAGCAGCCCGCCCTCAATGACTCCAGATACTGCCTGAGC | |
| | AGCCGCCTGAGGGTCTCGGCCACCTTCTGGCAGAACCCCCGCAACCACTTCCGCTGTCAAGTC | |
| | CAGTTCTACGGGCTCTCGGAGAATGACGAGTGGACCCAGGATAGGGCCAAACCTGTCACCCAG | |
| | ATCGTCAGCGCCGAGGCCTGGGGTAGAGCAGACTGTGGCTTCACCTCCGAGTCTTACCAGCAA | |
| | GGGGTCCTGTCTGCCACCATCCTCTATGAGATCTTGCTAGGGAAGGCCACCTTGTATGCCGTG | |
| | CTGGTCAGTGCCCTCGTGCTGATGGCCATGGTCAAGAGAAAGGATTCCAGAGGCTAG | |
| 148 | ATGAAATCCTTGAGAGTTTTACTGGTGATCCTGTGGCTTCAGTTAAGCTGGGTTTGGAGCCAA | TCR J full |
| | CAGAAGGAGGTGGAGCAGGATCCTGGACCACTCAGTGTTCCAGAGGGAGCCATTGTTTCTCTC | construct nt |
| | AACTGCACTTACAGCAACAGTGCTTTTCAATACTTCATGTGGTACAGACAGTATTCCAGAAAA | |
| | GGCCCTGAGTTGCTGATGTACACATACTCCAGTGGTAACAAAGAAGATGGAAGGTTTACAGCA | |
| | CAGGTCGATAAATCCAGCAAGTATATCTCCTTGTTCATCAGAGACTCACAGCCCAGTGATTCA | |
| | GCCACCTACCTCTGTGCAATGAGGGCTACCTCAGGAACCTACAAATACATCTTTGGAACAGGC | |
| | ACCAGGCTGAAGGTTTTAGCAAATATCCAGAACCCTGACCCTGCCGTGTACCAGCTGAGAGAC | |
| | TCTAAATCCAGTGACAAGTCTGTCTGCCTATTCACCGATTTTGATTCTCAAACAAATGTGTCA | |
| | CAAAGTAAGGATTCTGATGTGTATATCACAGACAAAACTGTGCTAGACATGAGGTCTATGGAC | |
| | TTCAAGAGCAACAGTGCTGTGGCCTGGAGCAACAAATCTGACTTTGCATGTGCAAACGCCTTC | |
| | AACAACAGCATTATTCCAGAAGACACCTTCTTCCCCAGCCCAGAAAGTTCCTGTGATGTCAAG | |
| | CTGGTCGAGAAAAGCTTTGAAACAGATACGAACCTAAACTTTCAAAACCTGTCAGTGATTGGG | |
| | TTCCGAATCCTCCTCCTGAAAGTGGCCGGGTTTAATCTGCTCATGACGCTGCGGCTGTGGTCC | |
| | AGCGGCTCCGGAGCCACGAACTTCTCTCTGTTAAAGCAAGCAGGAGACGTGGAAGAAAACCCC | |
| | GGTCCCATGGGTACCAGCCTCCTCTGCTGGATGGCCCTGTGTCTCCTGGGGGCAGATCACGCA | |
| | GATACTGGAGTCTCCCAGGACCCCAGACACAAGATCACAAAGAGGGGACAGAATGTAACTTTC | |
| | AGGTGTGATCCAATTTCTGAACACAACCGCCTTTATTGGTACCGACAGACCCTGGGGCAGGGC | |
| | CCAGAGTTTCTGACTTACTTCCAGAATGAAGCTCAACTAGAAAAATCAAGGCTGCTCAGTGAT | |
| | CGGTTCTCTGCAGAGAGGCCTAAGGGATCTTTCTCCACCTTGGAGATCCAGCGCACAGAGCAG | |
| | GGGGACTCGGCCATGTATCTCTGTGCCGTCCCTGGGGGGAGCTCCTACAATGAGCAGTTCTTC | |
| | GGGCCAGGGACACGGCTCACCGTGCTAGAGGACCTGAAAAACGTGTTCCCACCCGAGGTCGCT | |
| | GTGTTTGAGCCATCAGAAGCAGAGATCTCCCACACCCAAAAGGCCACACTGGTATGCCTGGCC | |
| | ACAGGCTTCTACCCCGACCACGTGGAGCTGAGCTGGTGGGTGAATGGGAAGGAGGTGCACAGT | |
| | GGGGTCAGCACAGACCCGCAGCCCCTCAAGGAGCAGCCCGCCCTCAATGACTCCAGATACTGC | |
| | CTGAGCAGCCGCCTGAGGGTCTCGGCCACCTTCTGGCAGAACCCCCGCAACCACTTCCGCTGT | |
| | CAAGTCCAGTTCTACGGGCTCTCGGAGAATGACGAGTGGACCCAGGATAGGGCCAAACCTGTC | |
| | ACCCAGATCGTCAGCGCCGAGGCCTGGGGTAGAGCAGACTGTGGCTTCACCTCCGAGTCTTAC | |
| | CAGCAAGGGGTCCTGTCTGCCACCATCCTCTATGAGATCTTGCTAGGGAAGGCCACCTTGTAT | |
| | GCCGTGCTGGTCAGTGCCCTCGTGCTGATGGCCATGGTCAAGAGAAAGGATTCCAGAGGCTAG | |
| 149 | MKSLRVLLVILWLQLSWVWSQQKEVEQDPGPLSVPEGAIVSLNCTYSNSAFQYFMWYRQYSRK | TCR J full |
| | GPELLMYTYSSGNKEDGRFTAQVDKSSKYISLFIRDSQPSDSATYLCAMRATSGTYKYIFGTG | construct aa |
| | TRLKVLANIQNPDPAVYQLRDSKSSDKSVCLFTDFDSQTNVSQSKDSDVYITDKTVLDMRSMD | |
| | FKSNSAVAWSNKSDFACANAFNNSIIPEDTFFPSPESSCDVKLVEKSFETDTNLNFQNLSVIG | |
| | FRILLLKVAGFNLLMTLRLWSSGSGATNFSLLKQAGDVEENPGPMGTSLLCWMALCLLGADHA | |
| | DTGVSQDPRHKITKRGQNVTFRCDPISEHNRLYWYRQTLGQGPEFLTYFQNEAQLEKSRLLSD | |
| | RFSAERPKGSFSTLEIQRTEQGDSAMYLCAVPGGSSYNEQFFGPGTRLTVLEDLKNVFPPEVA | |
| | VFEPSEAEISHTQKATLVCLATGFYPDHVELSWWVNGKEVHSGVSTDPQPLKEQPALNDSRYC | |
| | LSSRLRVSATFWQNPRNHFRCQVQFYGLSENDEWTQDRAKPVTQIVSAEAWGRADCGFTSESY | |
| | QQGVLSATILYEILLGKATLYAVLVSALVLMAMMKRKDSRG | |
| 150 | TISGTDY | TCR K Vα |
| | | CDR-1 |
| 151 | GLTSN | TCR K Vα |
| | | CDR-2 |
| 152 | ILRAGSGTYKYI | TCR K Vα |
| | | CDR-3 |
| 153 | DAKTTQPNSMESNEEEPVHLPCNHSTISGTDYIHWYRQLPSQGPEYVIHGLTSNVNNRMASLA | TCR K Vα |
| | IAEDRKSSTLILHRATLRDAAVYYCILRAGSGTYKYIFGTGTRLKVLAN | (aa) |
| 154 | MKLVTSITVLLSLGIMGDAKTTQPNSMESNEEEPVHLPCNHSTISGTDYIHWYRQLPSQGPEY | TCR K Vα + |
| | VIHGLTSNVNNRMASLAIAEDRKSSTLILHRATLRDAAVYYCILRAGSGTYKYIFGTGTRLKV | ss (aa) |
| | LAN | |
| 155 | MKLVTSITVLLSLGIMGDAKTTQPNSMESNEEEPVHLPCNHSTISGTDYIHWYRQLPSQGPEY | TCR K Vα + |
| | VIHGLTSNVNNRMASLAIAEDRKSSTLILHRATLRDAAVYYCILRAGSGTYKYIFGTGTRLKV | Cα (aa) |
| | LANIQNPDPAVYQLRDSKSSDKSVCLFTDFDSQTNVSQSKDSDVYITDKTVLDMRSMDFKSNS | |
| | AVAWSNKSDFACANAFNNSIIPEDTFFPSPESSCDVKLVEKSFETDTNLNFQNLSVIGFRILL | |
| | LKVAGFNLLMTLRLWSS | |
| 156 | ATGAAGTTGGTGACAAGCATTACTGTACTCCTATCTTTGGGTATTATGGGTGATGCTAAGACC | TCR K Vα |
| | ACACAGCCAAATTCAATGGAGAGTAACGAAGAAGAGCCTGTTCACTTGCCTTGTAACCACTCC | (nt) |
| | ACAATCAGTGGAACTGATTACATACATTGGTATCGACAGCTTCCCTCCCAGGGTCCAGAGTAC | |
| | GTGATTCATGGTCTTACAAGCAATGTGAACAACAGAATGGCCTCTCTGGCAATCGCTGAAGAC | |
| | AGAAAGTCCAGTACCTTGATCCTGCACCGTGCTACCTTGAGAGATGCTGCTGTGTACTACTGC | |
| | ATCCTGAGAGCGGGCTCAGGAACCTACAAATACATCTTTGGAACAGGCACCAGGCTGAAGGTT | |
| | CTAGCAAAT | |
| 157 | ATGAAGTTGGTGACAAGCATTACTGTACTCCTATCTTTGGGTATTATGGGTGATGCTAAGACC | TCR K Vα + |
| | ACACAGCCAAATTCAATGGAGAGTAACGAAGAAGAGCCTGTTCACTTGCCTTGTAACCACTCC | Cα (nt) |
| | ACAATCAGTGGAACTGATTACATACATTGGTATCGACAGCTTCCCTCCCAGGGTCCAGAGTAC | |
| | GTGATTCATGGTCTTACAAGCAATGTGAACAACAGAATGGCCTCTCTGGCAATCGCTGAAGAC | |
| | AGAAAGTCCAGTACCTTGATCCTGCACCGTGCTACCTTGAGAGATGCTGCTGTGTACTACTGC | |
| | ATCCTGAGAGCGGGCTCAGGAACCTACAAATACATCTTTGGAACAGGCACCAGGCTGAAGGTT | |
| | CTAGCAAATATCCAGAACCCTGACCCTGCCGTGTACCAGCTGAGAGACTCTAAATCCAGTGAC | |
| | AAGTCTGTCTGCCTATTCACCGATTTTGATTCTCAAACAAATGTGTCACAAAGTAAGGATTCT | |
| | GATGTGTATATCACAGACAAAACTGTGCTAGACATGAGGTCTATGGACTTCAAGAGCAACAGT | |
| | GCTGTGGCCTGGAGCAACAAATCTGACTTTGCATGTGCAAACGCCTTCAACAACAGCATTATT | |
| | CCAGAAGACACCTTCTTCCCCAGCCCAGAAAGTTCCTGTGATGTCAAGCTGGTCGAGAAAAGC | |
| | TTTGAAACAGATACGAACCTAAACTTTCAAAACCTGTCAGTGATTGGGTTCCGAATCCTCCTC | |
| | CTGAAAGTGGCCGGGTTTAATCTGCTCATGACGCTGCGGCTGTGGTCCAGC | |
| 158 | ASSPGTVYNEQF | TCR K, S Vβ |
| | | CDR-3 |
| 159 | DTGVSQDPRHKITKRGQNVTFRCDPISEHNRLYWYRQTLGQGPEFLTYFQNEAQLEKSRLLSD | TCR K, S Vβ |
| | RFSAERPKGSFSTLEIQRTEQGDSAMYLCASSPGTVYNEQFFGPGTRLTVLE | (aa) |
| 160 | MGTSLLCWMALCLLGADHADTGVSQDPRHKITKRGQNVTFRCDPISEHNRLYWYRQTLGQGPE | TCR K, S Vβ + |
| | FLTYFQNEAQLEKSRLLSDRFSAERPKGSFSTLEIQRTEQGDSAMYLCASSPGTVYNEQFFGP | ss (aa) |
| | GTRLTVLE | |
| 161 | MGTSLLCWMALCLLGADHADTGVSQDPRHKITKRGQNVTFRCDPISEHNRLYWYRQTLGQGPE | TCR K, S Vβ + |
| | FLTYFQNEAQLEKSRLLSDRFSAERPKGSFSTLEIQRTEQGDSAMYLCASSPGTVYNEQFFGP | Cβ (aa) |
| | GTRLTVLEDLKNVFPPEVAVFEPSEAEISHTQKATLVCLATGFYPDHVELSWWVNGKEVHSGV | |
| | STDPQPLKEQPALNDSRYCLSSRLRVSATFWQNPRNHFRCQVQFYGLSENDEWTQDRAKPVTQ | |
| | IVSAEAWGRADCGFTSESYQQGVLSATILYEILLGKATLYAVLVSALVLMAMVKRKDSRG | |
| 162 | ATGGGTACCAGCCTCCTCTGCTGGATGGCCCTGTGTCTCCTGGGGGCAGATCACGCAGATACT | TCR K Vβ |
| | GGAGTCTCCCAGGACCCCAGACACAAGATCACAAAGAGGGGACAGAATGTAACTTTCAGGTGT | (nt) |
| | GATCCAATTTCTGAACACAACCGCCTTTATTGGTACCGACAGACCCTGGGGCAGGGCCCAGAG | |
| | TTTCTGACTTACTTCCAGAATGAAGCTCAACTAGAAAAATCAAGGCTGCTCAGTGATCGGTTC | |
| | TCTGCAGAGAGGCCTAAGGGATCTTTCTCCACCTTGGAGATCCAGCGCACAGAGCAGGGGGAC | |
| | TCGGCCATGTATCTCTGTGCCAGCAGCCCCGGGACAGTTTACAATGAGCAGTTCTTCGGGCCA | |
| | GGGACACGGCTCACCGTGCTAGAG | |
| 163 | ATGGGTACCAGCCTCCTCTGCTGGATGGCCCTGTGTCTCCTGGGGGCAGATCACGCAGATACT | TCR K Vβ + |
| | GGAGTCTCCCAGGACCCCAGACACAAGATCACAAAGAGGGGACAGAATGTAACTTTCAGGTGT | Cβ (nt) |
| | GATCCAATTTCTGAACACAACCGCCTTTATTGGTACCGACAGACCCTGGGGCAGGGCCCAGAG | |
| | TTTCTGACTTACTTCCAGAATGAAGCTCAACTAGAAAAATCAAGGCTGCTCAGTGATCGGTTC | |
| | TCTGCAGAGAGGCCTAAGGGATCTTTCTCCACCTTGGAGATCCAGCGCACAGAGCAGGGGGAC | |
| | TCGGCCATGTATCTCTGTGCCAGCAGCCCCGGGACAGTTTACAATGAGCAGTTCTTCGGGCCA | |
| | GGGACACGGCTCACCGTGCTAGAGGACCTGAAAAACGTGTTCCCACCCGAGGTCGCTGTGTTT | |
| | GAGCCATCAGAAGCAGAGATCTCCCACACCCAAAAGGCCACACTGGTATGCCTGGCCACAGGC | |
| | TTCTACCCCGACCACGTGGAGCTGAGCTGGTGGGTGAATGGGAAGGAGGTGCACAGTGGGGTC | |
| | AGCACAGACCCGCAGCCCCTCAAGGAGCAGCCCGCCCTCAATGACTCCAGATACTGCCTGAGC | |
| | AGCCGCCTGAGGGTCTCGGCCACCTTCTGGCAGAACCCCCGCAACCACTTCCGCTGTCAAGTC | |
| | CAGTTCTACGGGCTCTCGGAGAATGACGAGTGGACCCAGGATAGGGCCAAACCTGTCACCCAG | |
| | ATCGTCAGCGCCGAGGCCTGGGGTAGAGCAGACTGTGGCTTCACCTCCGAGTCTTACCAGCAA | |
| | GGGGTCCTGTCTGCCACCATCCTCTATGAGATCTTGCTAGGGAAGGCCACCTTGTATGCCGTG | |
| | CTGGTCAGTGCCCTCGTGCTGATGGCCATGGTCAAGAGAAAGGATTCCAGAGGCTAG | |
| 164 | ATGAAGTTGGTGACAAGCATTACTGTACTCCTATCTTTGGGTATTATGGGTGATGCTAAGACC | TCR K full |
| | ACACAGCCAAATTCAATGGAGAGTAACGAAGAAGAGCCTGTTCACTTGCCTTGTAACCACTCC | construct nt |
| | ACAATCAGTGGAACTGATTACATACATTGGTATCGACAGCTTCCCTCCCAGGGTCCAGAGTAC | |
| | GTGATTCATGGTCTTACAAGCAATGTGAACAACAGAATGGCCTCTCTGGCAATCGCTGAAGAC | |
| | AGAAAGTCCAGTACCTTGATCCTGCACCGTGCTACCTTGAGAGATGCTGCTGTGTACTACTGC | |
| | ATCCTGAGAGCGGGCTCAGGAACCTACAAATACATCTTTGGAACAGGCACCAGGCTGAAGGTT | |
| | CTAGCAAATATCCAGAACCCTGACCCTGCCGTGTACCAGCTGAGAGACTCTAAATCCAGTGAC | |
| | AAGTCTGTCTGCCTATTCACCGATTTTGATTCTCAAACAAATGTGTCACAAAGTAAGGATTCT | |
| | GATGTGTATATCACAGACAAAACTGTGCTAGACATGAGGTCTATGGACTTCAAGAGCAACAGT | |
| | GCTGTGGCCTGGAGCAACAAATCTGACTTTGCATGTGCAAACGCCTTCAACAACAGCATTATT | |
| | CCAGAAGACACCTTCTTCCCCAGCCCAGAAAGTTCCTGTGATGTCAAGCTGGTCGAGAAAAGC | |
| | TTTGAAACAGATACGAACCTAAACTTTCAAAACCTGTCAGTGATTGGGTTCCGAATCCTCCTC | |
| | CTGAAAGTGGCCGGGTTTAATCTGCTCATGACGCTGCGGCTGTGGTCCAGCGGCTCCGGAGCC | |
| | ACGAACTTCTCTCTGTTAAAGCAAGCAGGAGACGTGGAAGAAAACCCCGGTCCCATGGGTACC | |
| | AGCCTCCTCTGCTGGATGGCCCTGTGTCTCCTGGGGGCAGATCACGCAGATACTGGAGTCTCC | |
| | CAGGACCCCAGACACAAGATCACAAAGAGGGGACAGAATGTAACTTTCAGGTGTGATCCAATT | |
| | TCTGAACACAACCGCCTTTATTGGTACCGACAGACCCTGGGGCAGGGCCCAGAGTTTCTGACT | |
| | TACTTCCAGAATGAAGCTCAACTAGAAAAATCAAGGCTGCTCAGTGATCGGTTCTCTGCAGAG | |
| | AGGCCTAAGGGATCTTTCTCCACCTTGGAGATCCAGCGCACAGAGCAGGGGGACTCGGCCATG | |
| | TATCTCTGTGCCAGCAGCCCCGGGACAGTTTACAATGAGCAGTTCTTCGGGCCAGGGACACGG | |
| | CTCACCGTGCTAGAGGACCTGAAAAACGTGTTCCCACCCGAGGTCGCTGTGTTTGAGCCATCA | |
| | GAAGCAGAGATCTCCCACACCCAAAAGGCCACACTGGTATGCCTGGCCACAGGCTTCTACCCC | |
| | GACCACGTGGAGCTGAGCTGGTGGGTGAATGGGAAGGAGGTGCACAGTGGGGTCAGCACAGAC | |
| | CCGCAGCCCCTCAAGGAGCAGCCCGCCCTCAATGACTCCAGATACTGCCTGAGCAGCCGCCTG | |
| | AGGGTCTCGGCCACCTTCTGGCAGAACCCCCGCAACCACTTCCGCTGTCAAGTCCAGTTCTAC | |
| | GGGCTCTCGGAGAATGACGAGTGGACCCAGGATAGGGCCAAACCTGTCACCCAGATCGTCAGC | |
| | GCCGAGGCCTGGGGTAGAGCAGACTGTGGCTTCACCTCCGAGTCTTACCAGCAAGGGGTCCTG | |
| | TCTGCCACCATCCTCTATGAGATCTTGCTAGGGAAGGCCACCTTGTATGCCGTGCTGGTCAGT | |
| | GCCCTCGTGCTGATGGCCATGGTCAAGAGAAAGGATTCCAGAGGCTAG | |
| 165 | MKLVTSITVLLSLGIMGDAKTTQPNSMESNEEEPVHLPCNHSTISGTDYIHWYRQLPSQGPEY | TCR K full |
| | VIHGLTSNVNNRMASLAIAEDRKSSTLILHRATLRDAAVYYCILRAGSGTYKYIFGTGTRLKV | construct aa |
| | LANIQNPDPAVYQLRDSKSSDKSVCLFTDFDSQTNVSQSKDSDVYITDKTVLDMRSMDFKSNS | |
| | AVAWSNKSDFACANAFNNSIIPEDTFFPSPESSCDVKLVEKSFETDTNLNFQNLSVIGFRILL | |
| | LKVAGFNLLMTLRLWSSGSGATNFSLLKQAGDVEENPGPMGTSLLCWMALCLLGADHADTGVS | |
| | QDPRHKITKRGQNVTFRCDPISEHNRLYWYRQTLGQGPEFLTYFQNEAQLEKSRLLSDRFSAE | |
| | RPKGSFSTLEIQRTEQGDSAMYLCASSPGTVYNEQFFGPGTRLTVLEDLKNVEPPEVAVFEPS | |
| | EAEISHTQKATLVCLATGFYPDHVELSWWVNGKEVHSGVSTDPQPLKEQPALNDSRYCLSSRL | |
| | RVSATFWQNPRNHFRCQVQFYGLSENDEWTQDRAKPVTQIVSAEAWGRADCGFTSESYQQGVL | |
| | SATILYEILLGKATLYAVLVSALVLMAMVKRKDSRG | |
| 166 | AVTRTGANNLF | TCR L Vα |
| | | CDR-3 |
| 167 | KQEVTQIPAALSVPEGENLVLNCSFTDSAIYNLQWFRQDPGKGLTSLLLIQSSQREQTSGRLN | TCR L Vα |
| | ASLDKSSGRSTLYIAASQPGDSATYLCAVTRTGANNLFFGTGTRLTVIPY | (aa) |
| 168 | METLLGLLILWLQLQWVSSKQEVTQIPAALSVPEGENLVLNCSFTDSAIYNLQWFRQDPGKGL | TCR L Vα + |
| | TSLLLIQSSQREQTSGRLNASLDKSSGRSTLYIAASQPGDSATYLCAVTRTGANNLFFGTGTR | ss (aa) |
| | LTVIPY | |
| 169 | METLLGLLILWLQLQWVSSKQEVTQIPAALSVPEGENLVLNCSFTDSAIYNLQWFRQDPGKGL | TCR L Vα + |
| | TSLLLIQSSQREQTSGRLNASLDKSSGRSTLYIAASQPGDSATYLCAVTRTGANNLFFGTGTR | Cα (aa) |
| | LTVIPYIQNPDPAVYQLRDSKSSDKSVCLFTDFDSQTNVSQSKDSDVYITDKTVLDMRSMDFK | |
| | SNSAVAWSNKSDFACANAFNNSIIPEDTFFPSPESSCDVKLVEKSFETDTNLNFQNLSVIGFR | |
| | ILLLKVAGFNLLMTLRLWSS | |
| 170 | ATGGAGACCCTCTTGGGCCTGCTTATCCTTTGGCTGCAGCTGCAATGGGTGAGCAGCAAACAG | TCR L Vα |
| | GAGGTGACGCAGATTCCTGCAGCTCTGAGTGTCCCAGAAGGAGAAAACTTGGTTCTCAACTGC | (nt) |
| | AGTTTCACTGATAGCGCTATTTACAACCTCCAGTGGTTTAGGCAGGACCCTGGGAAAGGTCTC | |
| | ACATCTCTGTTGCTTATTCAGTCAAGTCAGAGAGAGCAAACAAGTGGAAGACTTAATGCCTCG | |
| | CTGGATAAATCATCAGGACGTAGTACTTTATACATTGCAGCTTCTCAGCCTGGTGACTCAGCC | |
| | ACCTACCTCTGTGCTGTGACGAGGACTGGGGCAAACAACCTCTTCTTTGGGACTGGAACGAGA | |
| | CTCACCGTTATTCCCTAT | |
| 171 | ATGGAGACCCTCTTGGGCCTGCTTATCCTTTGGCTGCAGCTGCAATGGGTGAGCAGCAAACAG | TCR L Vα + |
| | GAGGTGACGCAGATTCCTGCAGCTCTGAGTGTCCCAGAAGGAGAAAACTTGGTTCTCAACTGC | Cα (nt) |
| | AGTTTCACTGATAGCGCTATTTACAACCTCCAGTGGTTTAGGCAGGACCCTGGGAAAGGTCTC | |
| | ACATCTCTGTTGCTTATTCAGTCAAGTCAGAGAGAGCAAACAAGTGGAAGACTTAATGCCTCG | |
| | CTGGATAAATCATCAGGACGTAGTACTTTATACATTGCAGCTTCTCAGCCTGGTGACTCAGCC | |
| | ACCTACCTCTGTGCTGTGACGAGGACTGGGGCAAACAACCTCTTCTTTGGGACTGGAACGAGA | |
| | CTCACCGTTATTCCCTATATCCAGAACCCTGACCCTGCCGTGTACCAGCTGAGAGACTCTAAA | |
| | TCCAGTGACAAGTCTGTCTGCCTATTCACCGATTTTGATTCTCAAACAAATGTGTCACAAAGT | |
| | AAGGATTCTGATGTGTATATCACAGACAAAACTGTGCTAGACATGAGGTCTATGGACTTCAAG | |
| | AGCAACAGTGCTGTGGCCTGGAGCAACAAATCTGACTTTGCATGTGCAAACGCCTTCAACAAC | |
| | AGCATTATTCCAGAAGACACCTTCTTCCCCAGCCCAGAAAGTTCCTGTGATGTCAAGCTGGTC | |
| | GAGAAAAGCTTTGAAACAGATACGAACCTAAACTTTCAAAACCTGTCAGTGATTGGGTTCCGA | |
| | ATCCTCCTCCTGAAAGTGGCCGGGTTTAATCTGCTCATGACGCTGCGGCTGTGGTCCAGC | |
| 172 | ASSLGVLGIGYT | TCR L Vβ |
| | | CDR-3 |
| 173 | DTGVSQDPRHKITKRGQNVTFRCDPISEHNRLYWYRQTLGQGPEFLTYFQNEAQLEKSRLLSD | TCR L Vβ |
| | RFSAERPKGSFSTLEIQRTEQGDSAMYLCASSLGVLGIGYTFGSGTRLTVVE | (aa) |
| 174 | MGTSLLCWMALCLLGADHADTGVSQDPRHKITKRGQNVTFRCDPISEHNRLYWYRQTLGQGPE | TCR L Vβ + |
| | FLTYFQNEAQLEKSRLLSDRFSAERPKGSFSTLEIQRTEQGDSAMYLCASSLGVLGIGYTFGS | ss (aa) |
| | GTRLTVVE | |
| 175 | MGTSLLCWMALCLLGADHADTGVSQDPRHKITKRGQNVTFRCDPISEHNRLYWYRQTLGQGPE | TCR L Vβ + |
| | FLTYFQNEAQLEKSRLLSDRFSAERPKGSFSTLEIQRTEQGDSAMYLCASSLGVLGIGYTFGS | Cβ (aa) |
| | GTRLTVVEDLNKVFPPEVAVFEPSEAEISHTQKATLVCLATGFFPDHVELSWWVNGKEVHSGV | |
| | STDPQPLKEQPALNDSRYCLSSRLRVSATFWQNPRNHERCQVQFYGLSENDEWTQDRAKPVTQ | |
| | IVSAEAWGRADCGFTSVSYQQGVLSATILYEILLGKATLYAVLVSALVLMAMVKRKDF | |
| 176 | ATGGGTACCAGCCTCCTCTGCTGGATGGCCCTGTGTCTCCTGGGGGCAGATCACGCAGATACT | TCR L Vβ |
| | GGAGTCTCCCAGGACCCCAGACACAAGATCACAAAGAGGGGACAGAATGTAACTTTCAGGTGT | (nt) |
| | GATCCAATTTCTGAACACAACCGCCTTTATTGGTACCGACAGACCCTGGGGCAGGGCCCAGAG | |
| | TTTCTGACTTACTTCCAGAATGAAGCTCAACTAGAAAAATCAAGGCTGCTCAGTGATCGGTTC | |
| | TCTGCAGAGAGGCCTAAGGGATCTTTCTCCACCTTGGAGATCCAGCGCACAGAGCAGGGGGAC | |
| | TCGGCCATGTATCTCTGTGCCAGCAGCTTAGGAGTACTCGGGATCGGCTACACCTTCGGTTCG | |
| | GGGACCAGGTTAACCGTTGTAGAG | |
| 177 | ATGGGTACCAGCCTCCTCTGCTGGATGGCCCTGTGTCTCCTGGGGGCAGATCACGCAGATACT | TCR L Vβ + |
| | GGAGTCTCCCAGGACCCCAGACACAAGATCACAAAGAGGGGACAGAATGTAACTTTCAGGTGT | Cβ (nt) |
| | GATCCAATTTCTGAACACAACCGCCTTTATTGGTACCGACAGACCCTGGGGCAGGGCCCAGAG | |
| | TTTCTGACTTACTTCCAGAATGAAGCTCAACTAGAAAAATCAAGGCTGCTCAGTGATCGGTTC | |
| | TCTGCAGAGAGGCCTAAGGGATCTTTCTCCACCTTGGAGATCCAGCGCACAGAGCAGGGGGAC | |
| | TCGGCCATGTATCTCTGTGCCAGCAGCTTAGGAGTACTCGGGATCGGCTACACCTTCGGTTCG | |
| | GGGACCAGGTTAACCGTTGTAGAGGACCTGAACAAGGTGTTCCCACCCGAGGTCGCTGTGTTT | |
| | GAGCCATCAGAAGCAGAGATCTCCCACACCCAAAAGGCCACACTGGTGTGCCTGGCCACAGGC | |
| | TTCTTCCCCGACCACGTGGAGCTGAGCTGGTGGGTGAATGGGAAGGAGGTGCACAGTGGGGTC | |
| | AGCACAGACCCGCAGCCCCTCAAGGAGCAGCCCGCCCTCAATGACTCCAGATACTGCCTGAGC | |
| | AGCCGCCTGAGGGTCTCGGCCACCTTCTGGCAGAACCCCCGCAACCACTTCCGCTGTCAAGTC | |
| | CAGTTCTACGGGCTCTCGGAGAATGACGAGTGGACCCAGGATAGGGCCAAACCCGTCACCCAG | |
| | ATCGTCAGCGCCGAGGCCTGGGGTAGAGCAGACTGTGGCTTTACCTCGGTGTCCTACCAGCAA | |
| | GGGGTCCTGTCTGCCACCATCCTCTATGAGATCCTGCTAGGGAAGGCCACCCTGTATGCTGTG | |
| | CTGGTCAGCGCCCTTGTGTTGATGGCCATGGTCAAGAGAAAGGATTTCTGA | |
| 178 | ATGGAGACCCTCTTGGGCCTGCTTATCCTTTGGCTGCAGCTGCAATGGGTGAGCAGCAAACAG | TCR L full |
| | GAGGTGACGCAGATTCCTGCAGCTCTGAGTGTCCCAGAAGGAGAAAACTTGGTTCTCAACTGC | construct nt |
| | AGTTTCACTGATAGCGCTATTTACAACCTCCAGTGGTTTAGGCAGGACCCTGGGAAAGGTCTC | |
| | ACATCTCTGTTGCTTATTCAGTCAAGTCAGAGAGAGCAAACAAGTGGAAGACTTAATGCCTCG | |
| | CTGGATAAATCATCAGGACGTAGTACTTTATACATTGCAGCTTCTCAGCCTGGTGACTCAGCC | |
| | ACCTACCTCTGTGCTGTGACGAGGACTGGGGCAAACAACCTCTTCTTTGGGACTGGAACGAGA | |
| | CTCACCGTTATTCCCTATATCCAGAACCCTGACCCTGCCGTGTACCAGCTGAGAGACTCTAAA | |
| | TCCAGTGACAAGTCTGTCTGCCTATTCACCGATTTTGATTCTCAAACAAATGTGTCACAAAGT | |
| | AAGGATTCTGATGTGTATATCACAGACAAAACTGTGCTAGACATGAGGTCTATGGACTTCAAG | |
| | AGCAACAGTGCTGTGGCCTGGAGCAACAAATCTGACTTTGCATGTGCAAACGCCTTCAACAAC | |
| | AGCATTATTCCAGAAGACACCTTCTTCCCCAGCCCAGAAAGTTCCTGTGATGTCAAGCTGGTC | |
| | GAGAAAAGCTTTGAAACAGATACGAACCTAAACTTTCAAAACCTGTCAGTGATTGGGTTCCGA | |
| | ATCCTCCTCCTGAAAGTGGCCGGGTTTAATCTGCTCATGACGCTGCGGCTGTGGTCCAGCGGC | |
| | TCCGGAGCCACGAACTTCTCTCTGTTAAAGCAAGCAGGAGACGTGGAAGAAAACCCCGGTCCC | |
| | ATGGGTACCAGCCTCCTCTGCTGGATGGCCCTGTGTCTCCTGGGGGCAGATCACGCAGATACT | |
| | GGAGTCTCCCAGGACCCCAGACACAAGATCACAAAGAGGGGACAGAATGTAACTTTCAGGTGT | |
| | GATCCAATTTCTGAACACAACCGCCTTTATTGGTACCGACAGACCCTGGGGCAGGGCCCAGAG | |
| | TTTCTGACTTACTTCCAGAATGAAGCTCAACTAGAAAAATCAAGGCTGCTCAGTGATCGGTTC | |
| | TCTGCAGAGAGGCCTAAGGGATCTTTCTCCACCTTGGAGATCCAGCGCACAGAGCAGGGGGAC | |
| | TCGGCCATGTATCTCTGTGCCAGCAGCTTAGGAGTACTCGGGATCGGCTACACCTTCGGTTCG | |
| | GGGACCAGGTTAACCGTTGTAGAGGACCTGAACAAGGTGTTCCCACCCGAGGTCGCTGTGTTT | |
| | GAGCCATCAGAAGCAGAGATCTCCCACACCCAAAAGGCCACACTGGTGTGCCTGGCCACAGGC | |
| | TTCTTCCCCGACCACGTGGAGCTGAGCTGGTGGGTGAATGGGAAGGAGGTGCACAGTGGGGTC | |
| | AGCACAGACCCGCAGCCCCTCAAGGAGCAGCCCGCCCTCAATGACTCCAGATACTGCCTGAGC | |
| | AGCCGCCTGAGGGTCTCGGCCACCTTCTGGCAGAACCCCCGCAACCACTTCCGCTGTCAAGTC | |
| | CAGTTCTACGGGCTCTCGGAGAATGACGAGTGGACCCAGGATAGGGCCAAACCCGTCACCCAG | |
| | ATCGTCAGCGCCGAGGCCTGGGGTAGAGCAGACTGTGGCTTTACCTCGGTGTCCTACCAGCAA | |
| | GGGGTCCTGTCTGCCACCATCCTCTATGAGATCCTGCTAGGGAAGGCCACCCTGTATGCTGTG | |
| | CTGGTCAGCGCCCTTGTGTTGATGGCCATGGTCAAGAGAAAGGATTTCTGA | |
| 179 | METLLGLLILWLQLQWVSSKQEVTQIPAALSVPEGENLVLNCSFTDSAIYNLQWFRQDPGKGL | TCR L full |
| | TSLLLIQSSQREQTSGRLNASLDKSSGRSTLYIAASQPGDSATYLCAVTRTGANNLFFGTGTR | construct aa |
| | LTVIPYIQNPDPAVYQLRDSKSSDKSVCLFTDFDSQTNVSQSKDSDVYITDKTVLDMRSMDFK | |
| | SNSAVAWSNKSDFACANAFNNSIIPEDTFFPSPESSCDVKLVEKSFETDTNLNFQNLSVIGER | |
| | ILLLKVAGFNLLMTLRLWSSGSGATNFSLLKQAGDVEENPGPMGTSLLCWMALCLLGADHADT | |
| | GVSQDPRHKITKRGQNVTFRCDPISEHNRLYWYRQTLGQGPEFLTYFQNEAQLEKSRLLSDRF | |
| | SAERPKGSFSTLEIQRTEQGDSAMYLCASSLGVLGIGYTFGSGTRLTVVEDLNKVFPPEVAVF | |
| | EPSEAEISHTQKATLVCLATGFFPDHVELSWWVNGKEVHSGVSTDPQPLKEQPALNDSRYCLS | |
| | SRLRVSATFWQNPRNHFRCQVQFYGLSENDEWTQDRAKPVTQIVSAEAWGRADCGFTSVSYQQ | |
| | GVLSATILYEILLGKATLYAVLVSALVLMAMVKRKDF | |
| 180 | AVRGSTSGTYKYI | TCR M Vα |
| | | CDR-3 |
| 181 | KQEVTQIPAALSVPEGENLVLNCSFTDSAIYNLQWFRQDPGKGLTSLLLIQSSQREQTSGRLN | TCR M Vα |
| | ASLDKSSGRSTLYIAASQPGDSATYLCAVRGSTSGTYKYIFGTGTRLKVLAN | (aa) |
| 182 | METLLGLLILWLQLQWVSSKQEVTQIPAALSVPEGENLVLNCSFTDSAIYNLQWFRQDPGKGL | TCR M Vα + |
| | TSLLLIQSSQREQTSGRLNASLDKSSGRSTLYIAASQPGDSATYLCAVRGSTSGTYKYIFGTG | ss (aa) |
| | TRLKVLAN | |
| 183 | METLLGLLILWLQLQWVSSKQEVTQIPAALSVPEGENLVLNCSFTDSAIYNLQWFRQDPGKGL | TCR M Vα + |
| | TSLLLIQSSQREQTSGRLNASLDKSSGRSTLYIAASQPGDSATYLCAVRGSTSGTYKYIFGTG | Cα (aa) |
| | TRLKVLANIQNPDPAVYQLRDSKSSDKSVCLFTDFDSQTNVSQSKDSDVYITDKTVLDMRSMD | |
| | FKSNSAVAWSNKSDFACANAFNNSIIPEDTFFPSPESSCDVKLVEKSFETDTNLNFQNLSVIG | |
| | FRILLLKVAGFNLLMTLRLWSS | |
| 184 | ATGGAGACCCTCTTGGGCCTGCTTATCCTTTGGCTGCAGCTGCAATGGGTGAGCAGCAAACAG | TCR M Vα |
| | GAGGTGACGCAGATTCCTGCAGCTCTGAGTGTCCCAGAAGGAGAAAACTTGGTTCTCAACTGC | (nt) |
| | AGTTTCACTGATAGCGCTATTTACAACCTCCAGTGGTTTAGGCAGGACCCTGGGAAAGGTCTC | |
| | ACATCTCTGTTGCTTATTCAGTCAAGTCAGAGAGAGCAAACAAGTGGAAGACTTAATGCCTCG | |
| | CTGGATAAATCATCAGGACGTAGTACTTTATACATTGCAGCTTCTCAGCCTGGTGACTCAGCC | |
| | ACCTACCTCTGTGCTGTGAGGGGGAGTACCTCAGGAACCTACAAATACATCTTTGGAACAGGC | |
| | ACCAGGCTGAAGGTTTTAGCAAAT | |
| 185 | ATGGAGACCCTCTTGGGCCTGCTTATCCTTTGGCTGCAGCTGCAATGGGTGAGCAGCAAACAG | TCR M Vα + |
| | GAGGTGACGCAGATTCCTGCAGCTCTGAGTGTCCCAGAAGGAGAAAACTTGGTTCTCAACTGC | Cα (nt) |
| | AGTTTCACTGATAGCGCTATTTACAACCTCCAGTGGTTTAGGCAGGACCCTGGGAAAGGTCTC | |
| | ACATCTCTGTTGCTTATTCAGTCAAGTCAGAGAGAGCAAACAAGTGGAAGACTTAATGCCTCG | |
| | CTGGATAAATCATCAGGACGTAGTACTTTATACATTGCAGCTTCTCAGCCTGGTGACTCAGCC | |
| | ACCTACCTCTGTGCTGTGAGGGGGAGTACCTCAGGAACCTACAAATACATCTTTGGAACAGGC | |
| | ACCAGGCTGAAGGTTTTAGCAAATATCCAGAACCCTGACCCTGCCGTGTACCAGCTGAGAGAC | |
| | TCTAAATCCAGTGACAAGTCTGTCTGCCTATTCACCGATTTTGATTCTCAAACAAATGTGTCA | |
| | CAAAGTAAGGATTCTGATGTGTATATCACAGACAAAACTGTGCTAGACATGAGGTCTATGGAC | |
| | TTCAAGAGCAACAGTGCTGTGGCCTGGAGCAACAAATCTGACTTTGCATGTGCAAACGCCTTC | |
| | AACAACAGCATTATTCCAGAAGACACCTTCTTCCCCAGCCCAGAAAGTTCCTGTGATGTCAAG | |
| | CTGGTCGAGAAAAGCTTTGAAACAGATACGAACCTAAACTTTCAAAACCTGTCAGTGATTGGG | |
| | TTCCGAATCCTCCTCCTGAAAGTGGCCGGGTTTAATCTGCTCATGACGCTGCGGCTGTGGTCC | |
| | AGC | |
| 186 | ASSLVAGETQY | TCR M Vβ |
| | | CDR-3 |
| 187 | DTGVSQDPRHKITKRGQNVTFRCDPISEHNRLYWYRQTLGQGPEFLTYFQNEAQLEKSRLLSD | TCR M Vβ |
| | RFSAERPKGSFSTLEIQRTEQGDSAMYLCASSLVAGETQYFGPGTRLLVLE | (aa) |
| 188 | MGTSLLCWMALCLLGADHADTGVSQDPRHKITKRGQNVTFRCDPISEHNRLYWYRQTLGQGPE | TCR M Vβ + |
| | FLTYFQNEAQLEKSRLLSDRFSAERPKGSFSTLEIQRTEQGDSAMYLCASSLVAGETQYFGPG | ss (aa) |
| | TRLLVLE | |
| 189 | MGTSLLCWMALCLLGADHADTGVSQDPRHKITKRGQNVTFRCDPISEHNRLYWYRQTLGQGPE | TCR M Vβ + |
| | FLTYFQNEAQLEKSRLLSDRFSAERPKGSFSTLEIQRTEQGDSAMYLCASSLVAGETQYFGPG | Cβ (aa) |
| | TRLLVLEDLKNVFPPEVAVFEPSEAEISHTQKATLVCLATGFYPDHVELSWWVNGKEVHSGVS | |
| | TDPQPLKEQPALNDSRYCLSSRLRVSATFWQNPRNHERCQVQFYGLSENDEWTQDRAKPVTQI | |
| | VSAEAWGRADCGFTSESYQQGVLSATILYEILLGKATLYAVLVSALVLMAMVKRKDSRG | |
| 190 | ATGGGTACCAGCCTCCTCTGCTGGATGGCCCTGTGTCTCCTGGGGGCAGATCACGCAGATACT | TCR M Vβ |
| | GGAGTCTCCCAGGACCCCAGACACAAGATCACAAAGAGGGGACAGAATGTAACTTTCAGGTGT | (nt) |
| | GATCCAATTTCTGAACACAACCGCCTTTATTGGTACCGACAGACCCTGGGGCAGGGCCCAGAG | |
| | TTTCTGACTTACTTCCAGAATGAAGCTCAACTAGAAAAATCAAGGCTGCTCAGTGATCGGTTC | |
| | TCTGCAGAGAGGCCTAAGGGATCTTTCTCCACCTTGGAGATCCAGCGCACAGAGCAGGGGGAC | |
| | TCGGCCATGTATCTCTGTGCCAGCAGCTTAGTCGCCGGAGAGACCCAGTACTTCGGGCCAGGC | |
| | ACGCGGCTCCTGGTGCTCGAG | |
| 191 | ATGGGTACCAGCCTCCTCTGCTGGATGGCCCTGTGTCTCCTGGGGGCAGATCACGCAGATACT | TCR M Vβ + |
| | GGAGTCTCCCAGGACCCCAGACACAAGATCACAAAGAGGGGACAGAATGTAACTTTCAGGTGT | Cβ (nt) |
| | GATCCAATTTCTGAACACAACCGCCTTTATTGGTACCGACAGACCCTGGGGCAGGGCCCAGAG | |
| | TTTCTGACTTACTTCCAGAATGAAGCTCAACTAGAAAAATCAAGGCTGCTCAGTGATCGGTTC | |
| | TCTGCAGAGAGGCCTAAGGGATCTTTCTCCACCTTGGAGATCCAGCGCACAGAGCAGGGGGAC | |
| | TCGGCCATGTATCTCTGTGCCAGCAGCTTAGTCGCCGGAGAGACCCAGTACTTCGGGCCAGGC | |
| | ACGCGGCTCCTGGTGCTCGAGGACCTGAAAAACGTGTTCCCACCCGAGGTCGCTGTGTTTGAG | |
| | CCATCAGAAGCAGAGATCTCCCACACCCAAAAGGCCACACTGGTATGCCTGGCCACAGGCTTC | |
| | TACCCCGACCACGTGGAGCTGAGCTGGTGGGTGAATGGGAAGGAGGTGCACAGTGGGGTCAGC | |
| | ACAGACCCGCAGCCCCTCAAGGAGCAGCCCGCCCTCAATGACTCCAGATACTGCCTGAGCAGC | |
| | CGCCTGAGGGTCTCGGCCACCTTCTGGCAGAACCCCCGCAACCACTTCCGCTGTCAAGTCCAG | |
| | TTCTACGGGCTCTCGGAGAATGACGAGTGGACCCAGGATAGGGCCAAACCTGTCACCCAGATC | |
| | GTCAGCGCCGAGGCCTGGGGTAGAGCAGACTGTGGCTTCACCTCCGAGTCTTACCAGCAAGGG | |
| | GTCCTGTCTGCCACCATCCTCTATGAGATCTTGCTAGGGAAGGCCACCTTGTATGCCGTGCTG | |
| | GTCAGTGCCCTCGTGCTGATGGCCATGGTCAAGAGAAAGGATTCCAGAGGCTAG | |
| 192 | ATGGAGACCCTCTTGGGCCTGCTTATCCTTTGGCTGCAGCTGCAATGGGTGAGCAGCAAACAG | TCR M full |
| | GAGGTGACGCAGATTCCTGCAGCTCTGAGTGTCCCAGAAGGAGAAAACTTGGTTCTCAACTGC | construct nt |
| | AGTTTCACTGATAGCGCTATTTACAACCTCCAGTGGTTTAGGCAGGACCCTGGGAAAGGTCTC | |
| | ACATCTCTGTTGCTTATTCAGTCAAGTCAGAGAGAGCAAACAAGTGGAAGACTTAATGCCTCG | |
| | CTGGATAAATCATCAGGACGTAGTACTTTATACATTGCAGCTTCTCAGCCTGGTGACTCAGCC | |
| | ACCTACCTCTGTGCTGTGAGGGGGAGTACCTCAGGAACCTACAAATACATCTTTGGAACAGGC | |
| | ACCAGGCTGAAGGTTTTAGCAAATATCCAGAACCCTGACCCTGCCGTGTACCAGCTGAGAGAC | |
| | TCTAAATCCAGTGACAAGTCTGTCTGCCTATTCACCGATTTTGATTCTCAAACAAATGTGTCA | |
| | CAAAGTAAGGATTCTGATGTGTATATCACAGACAAAACTGTGCTAGACATGAGGTCTATGGAC | |
| | TTCAAGAGCAACAGTGCTGTGGCCTGGAGCAACAAATCTGACTTTGCATGTGCAAACGCCTTC | |
| | AACAACAGCATTATTCCAGAAGACACCTTCTTCCCCAGCCCAGAAAGTTCCTGTGATGTCAAG | |
| | CTGGTCGAGAAAAGCTTTGAAACAGATACGAACCTAAACTTTCAAAACCTGTCAGTGATTGGG | |
| | TTCCGAATCCTCCTCCTGAAAGTGGCCGGGTTTAATCTGCTCATGACGCTGCGGCTGTGGTCC | |
| | AGCGGCTCCGGAGCCACGAACTTCTCTCTGTTAAAGCAAGCAGGAGACGTGGAAGAAAACCCC | |
| | GGTCCCATGGGTACCAGCCTCCTCTGCTGGATGGCCCTGTGTCTCCTGGGGGCAGATCACGCA | |
| | GATACTGGAGTCTCCCAGGACCCCAGACACAAGATCACAAAGAGGGGACAGAATGTAACTTTC | |
| | AGGTGTGATCCAATTTCTGAACACAACCGCCTTTATTGGTACCGACAGACCCTGGGGCAGGGC | |
| | CCAGAGTTTCTGACTTACTTCCAGAATGAAGCTCAACTAGAAAAATCAAGGCTGCTCAGTGAT | |
| | CGGTTCTCTGCAGAGAGGCCTAAGGGATCTTTCTCCACCTTGGAGATCCAGCGCACAGAGCAG | |
| | GGGGACTCGGCCATGTATCTCTGTGCCAGCAGCTTAGTCGCCGGAGAGACCCAGTACTTCGGG | |
| | CCAGGCACGCGGCTCCTGGTGCTCGAGGACCTGAAAAACGTGTTCCCACCCGAGGTCGCTGTG | |
| | TTTGAGCCATCAGAAGCAGAGATCTCCCACACCCAAAAGGCCACACTGGTATGCCTGGCCACA | |
| | GGCTTCTACCCCGACCACGTGGAGCTGAGCTGGTGGGTGAATGGGAAGGAGGTGCACAGTGGG | |
| | GTCAGCACAGACCCGCAGCCCCTCAAGGAGCAGCCCGCCCTCAATGACTCCAGATACTGCCTG | |
| | AGCAGCCGCCTGAGGGTCTCGGCCACCTTCTGGCAGAACCCCCGCAACCACTTCCGCTGTCAA | |
| | GTCCAGTTCTACGGGCTCTCGGAGAATGACGAGTGGACCCAGGATAGGGCCAAACCTGTCACC | |
| | CAGATCGTCAGCGCCGAGGCCTGGGGTAGAGCAGACTGTGGCTTCACCTCCGAGTCTTACCAG | |
| | CAAGGGGTCCTGTCTGCCACCATCCTCTATGAGATCTTGCTAGGGAAGGCCACCTTGTATGCC | |
| | GTGCTGGTCAGTGCCCTCGTGCTGATGGCCATGGTCAAGAGAAAGGATTCCAGAGGCTAG | |
| 193 | METLLGLLILWLQLQWVSSKQEVTQIPAALSVPEGENLVLNCSFTDSAIYNLQWFRQDPGKGL | TCR M full |
| | TSLLLIQSSQREQTSGRLNASLDKSSGRSTLYIAASQPGDSATYLCAVRGSTSGTYKYIFGTG | construct aa |
| | TRLKVLANIQNPDPAVYQLRDSKSSDKSVCLFTDFDSQTNVSQSKDSDVYITDKTVLDMRSMD | |
| | FKSNSAVAWSNKSDFACANAFNNSIIPEDTFFPSPESSCDVKLVEKSFETDTNLNFQNLSVIG | |
| | FRILLLKVAGFNLLMTLRLWSSGSGATNFSLLKQAGDVEENPGPMGTSLLCWMALCLLGADHA | |
| | DTGVSQDPRHKITKRGQNVTFRCDPISEHNRLYWYRQTLGQGPEFLTYFQNEAQLEKSRLLSD | |
| | RFSAERPKGSFSTLEIQRTEQGDSAMYLCASSLVAGETQYFGPGTRLLVLEDLKNVFPPEVAV | |
| | FEPSEAEISHTQKATLVCLATGFYPDHVELSWWVNGKEVHSGVSTDPQPLKEQPALNDSRYCL | |
| | SSRLRVSATFWQNPRNHFRCQVQFYGLSENDEWTQDRAKPVTQIVSAEAWGRADCGFTSESYQ | |
| | QGVLSATILYEILLGKATLYAVLVSALVLMAMVKRKDSRG | |
| 194 | AAIVGNQFY | TCR N Vα |
| | | CDR-3 |
| 195 | GENVEQHPSTLSVQEGDSAVIKCTYSDSASNYFPWYKQELGKRPQLIIDIRSNVGEKKDQRIA | TCR N Vα |
| | VTLNKTAKHFSLHITETQPEDSAVYFCAAIVGNQFYFGTGTSLTVIPN | (aa) |
| 196 | MSIRALFIFLWLQLDLVNGENVEQHPSTLSVQEGDSAVIKCTYSDSASNYFPWYKQELGKRPQ | TCR N Vα + |
| | LIIDIRSNVGEKKDQRIAVTLNKTAKHFSLHITETQPEDSAVYFCAAIVGNQFYFGTGTSLTV | ss (aa) |
| | IPN | |
| 197 | MSIRALFIFLWLQLDLVNGENVEQHPSTLSVQEGDSAVIKCTYSDSASNYFPWYKQELGKRPQ | TCR N Vα + |
| | LIIDIRSNVGEKKDQRIAVTLNKTAKHFSLHITETQPEDSAVYFCAAIVGNQFYFGTGTSLTV | Cα (aa) |
| | IPNIQKPDPAVYQLRDSKSSDKSVCLFTDFDSQTNVSQSKDSDVYITDKTVLDMRSMDFKSNS | |
| | AVAWSNKSDFACANAFNNSIIPEDTFFPSPESSCDVKLVEKSFETDTNLNFQNLSVIGFRILL | |
| | LKVAGFNLLMTLRLWSS | |
| 198 | ATGTCCATTCGAGCTTTATTTATATTCCTGTGGCTGCAGCTGGACTTGGTGAATGGAGAGAAT | TCR N Vα |
| | GTGGAGCAGCATCCTTCAACCCTGAGTGTCCAGGAGGGAGACAGCGCTGTTATCAAGTGTACT | (nt) |
| | TATTCAGACAGTGCCTCAAACTACTTCCCTTGGTATAAGCAAGAACTTGGAAAAAGACCTCAG | |
| | CTTATTATAGACATTCGTTCAAATGTGGGCGAAAAGAAAGACCAACGAATTGCTGTTACATTG | |
| | AACAAGACAGCCAAACATTTCTCCCTGCACATCACAGAGACCCAACCTGAAGACTCGGCTGTC | |
| | TACTTCTGTGCAGCAATAGTCGGTAACCAGTTCTATTTTGGGACAGGGACAAGTTTGACGGTC | |
| | ATTCCAAAT | |
| 199 | ATGTCCATTCGAGCTTTATTTATATTCCTGTGGCTGCAGCTGGACTTGGTGAATGGAGAGAAT | TCR N Vα + |
| | GTGGAGCAGCATCCTTCAACCCTGAGTGTCCAGGAGGGAGACAGCGCTGTTATCAAGTGTACT | Cα (nt) |
| | TATTCAGACAGTGCCTCAAACTACTTCCCTTGGTATAAGCAAGAACTTGGAAAAAGACCTCAG | |
| | CTTATTATAGACATTCGTTCAAATGTGGGCGAAAAGAAAGACCAACGAATTGCTGTTACATTG | |
| | AACAAGACAGCCAAACATTTCTCCCTGCACATCACAGAGACCCAACCTGAAGACTCGGCTGTC | |
| | TACTTCTGTGCAGCAATAGTCGGTAACCAGTTCTATTTTGGGACAGGGACAAGTTTGACGGTC | |
| | ATTCCAAATATCCAGAAGCCTGACCCTGCCGTGTACCAGCTGAGAGACTCTAAATCCAGTGAC | |
| | AAGTCTGTCTGCCTATTCACCGATTTTGATTCTCAAACAAATGTGTCACAAAGTAAGGATTCT | |
| | GATGTGTATATCACAGACAAAACTGTGCTAGACATGAGGTCTATGGACTTCAAGAGCAACAGT | |
| | GCTGTGGCCTGGAGCAACAAATCTGACTTTGCATGTGCAAACGCCTTCAACAACAGCATTATT | |
| | CCAGAAGACACCTTCTTCCCCAGCCCAGAAAGTTCCTGTGATGTCAAGCTGGTCGAGAAAAGC | |
| | TTTGAAACAGATACGAACCTAAACTTTCAAAACCTGTCAGTGATTGGGTTCCGAATCCTCCTC | |
| | CTGAAAGTGGCCGGGTTTAATCTGCTCATGACGCTGCGGCTGTGGTCCAGC | |
| 200 | ASSETTLSEQF | TCR N Vβ |
| | | CDR-3 |
| 201 | DTGVSQDPRHKITKRGQNVTFRCDPISEHNRLYWYRQTLGQGPEFLTYFQNEAQLEKSRLLSD | TCR N Vβ |
| | RFSAERPKGSFSTLEIQRTEQGDSAMYLCASSETTLSEQFFGPGTRLTVLE | (aa) |
| 202 | MGTSLLCWMALCLLGADHADTGVSQDPRHKITKRGQNVTFRCDPISEHNRLYWYRQTLGQGPE | TCR N Vβ + |
| | FLTYFQNEAQLEKSRLLSDRFSAERPKGSFSTLEIQRTEQGDSAMYLCASSETTLSEQFFGPG | ss (aa) |
| | TRLTVLE | |
| 203 | MGTSLLCWMALCLLGADHADTGVSQDPRHKITKRGQNVTFRCDPISEHNRLYWYRQTLGQGPE | TCR N Vβ + |
| | FLTYFQNEAQLEKSRLLSDRFSAERPKGSFSTLEIQRTEQGDSAMYLCASSETTLSEQFFGPG | Cβ (aa) |
| | TRLTVLEDLKNVFPPEVAVFEPSEAEISHTQKATLVCLATGFYPDHVELSWWVNGKEVHSGVS | |
| | TDPQPLKEQPALNDSRYCLSSRLRVSATFWQNPRNHFRCQVQFYGLSENDEWTQDRAKPVTQI | |
| | VSAEAWGRADCGFTSESYQQGVLSATILYEILLGKATLYAVLVSALVLMAMVKRKDSRG | |
| 204 | ATGGGTACCAGCCTCCTCTGCTGGATGGCCCTGTGTCTCCTGGGGGCAGATCACGCAGATACT | TCR N Vβ |
| | GGAGTCTCCCAGGACCCCAGACACAAGATCACAAAGAGGGGACAGAATGTAACTTTCAGGTGT | (nt) |
| | GATCCAATTTCTGAACACAACCGCCTTTATTGGTACCGACAGACCCTGGGGCAGGGCCCAGAG | |
| | TTTCTGACTTACTTCCAGAATGAAGCTCAACTAGAAAAATCAAGGCTGCTCAGTGATCGGTTC | |
| | TCTGCAGAGAGGCCTAAGGGATCTTTCTCCACCTTGGAGATCCAGCGCACAGAGCAGGGGGAC | |
| | TCGGCCATGTATCTCTGTGCCAGCAGTGAAACTACGCTAAGTGAGCAGTTCTTCGGGCCAGGG | |
| | ACACGGCTCACCGTGCTAGAG | |
| 205 | ATGGGTACCAGCCTCCTCTGCTGGATGGCCCTGTGTCTCCTGGGGGCAGATCACGCAGATACT | TCR N Vβ + |
| | GGAGTCTCCCAGGACCCCAGACACAAGATCACAAAGAGGGGACAGAATGTAACTTTCAGGTGT | Cβ (nt) |
| | GATCCAATTTCTGAACACAACCGCCTTTATTGGTACCGACAGACCCTGGGGCAGGGCCCAGAG | |
| | TTTCTGACTTACTTCCAGAATGAAGCTCAACTAGAAAAATCAAGGCTGCTCAGTGATCGGTTC | |
| | TCTGCAGAGAGGCCTAAGGGATCTTTCTCCACCTTGGAGATCCAGCGCACAGAGCAGGGGGAC | |
| | TCGGCCATGTATCTCTGTGCCAGCAGTGAAACTACGCTAAGTGAGCAGTTCTTCGGGCCAGGG | |
| | ACACGGCTCACCGTGCTAGAGGACCTGAAAAACGTGTTCCCACCCGAGGTCGCTGTGTTTGAG | |
| | CCATCAGAAGCAGAGATCTCCCACACCCAAAAGGCCACACTGGTATGCCTGGCCACAGGCTTC | |
| | TACCCCGACCACGTGGAGCTGAGCTGGTGGGTGAATGGGAAGGAGGTGCACAGTGGGGTCAGC | |
| | ACAGACCCGCAGCCCCTCAAGGAGCAGCCCGCCCTCAATGACTCCAGATACTGCCTGAGCAGC | |
| | CGCCTGAGGGTCTCGGCCACCTTCTGGCAGAACCCCCGCAACCACTTCCGCTGTCAAGTCCAG | |
| | TTCTACGGGCTCTCGGAGAATGACGAGTGGACCCAGGATAGGGCCAAACCTGTCACCCAGATC | |
| | GTCAGCGCCGAGGCCTGGGGTAGAGCAGACTGTGGCTTCACCTCCGAGTCTTACCAGCAAGGG | |
| | GTCCTGTCTGCCACCATCCTCTATGAGATCTTGCTAGGGAAGGCCACCTTGTATGCCGTGCTG | |
| | GTCAGTGCCCTCGTGCTGATGGCCATGGTCAAGAGAAAGGATTCCAGAGGCTAG | |
| 206 | ATGTCCATTCGAGCTTTATTTATATTCCTGTGGCTGCAGCTGGACTTGGTGAATGGAGAGAAT | TCR N full |
| | GTGGAGCAGCATCCTTCAACCCTGAGTGTCCAGGAGGGAGACAGCGCTGTTATCAAGTGTACT | construct nt |
| | TATTCAGACAGTGCCTCAAACTACTTCCCTTGGTATAAGCAAGAACTTGGAAAAAGACCTCAG | |
| | CTTATTATAGACATTCGTTCAAATGTGGGCGAAAAGAAAGACCAACGAATTGCTGTTACATTG | |
| | AACAAGACAGCCAAACATTTCTCCCTGCACATCACAGAGACCCAACCTGAAGACTCGGCTGTC | |
| | TACTTCTGTGCAGCAATAGTCGGTAACCAGTTCTATTTTGGGACAGGGACAAGTTTGACGGTC | |
| | ATTCCAAATATCCAGAAGCCTGACCCTGCCGTGTACCAGCTGAGAGACTCTAAATCCAGTGAC | |
| | AAGTCTGTCTGCCTATTCACCGATTTTGATTCTCAAACAAATGTGTCACAAAGTAAGGATTCT | |
| | GATGTGTATATCACAGACAAAACTGTGCTAGACATGAGGTCTATGGACTTCAAGAGCAACAGT | |
| | GCTGTGGCCTGGAGCAACAAATCTGACTTTGCATGTGCAAACGCCTTCAACAACAGCATTATT | |
| | CCAGAAGACACCTTCTTCCCCAGCCCAGAAAGTTCCTGTGATGTCAAGCTGGTCGAGAAAAGC | |
| | TTTGAAACAGATACGAACCTAAACTTTCAAAACCTGTCAGTGATTGGGTTCCGAATCCTCCTC | |
| | CTGAAAGTGGCCGGGTTTAATCTGCTCATGACGCTGCGGCTGTGGTCCAGCGGCTCCGGAGCC | |
| | ACGAACTTCTCTCTGTTAAAGCAAGCAGGAGACGTGGAAGAAAACCCCGGTCCCATGGGTACC | |
| | AGCCTCCTCTGCTGGATGGCCCTGTGTCTCCTGGGGGCAGATCACGCAGATACTGGAGTCTCC | |
| | CAGGACCCCAGACACAAGATCACAAAGAGGGGACAGAATGTAACTTTCAGGTGTGATCCAATT | |
| | TCTGAACACAACCGCCTTTATTGGTACCGACAGACCCTGGGGCAGGGCCCAGAGTTTCTGACT | |
| | TACTTCCAGAATGAAGCTCAACTAGAAAAATCAAGGCTGCTCAGTGATCGGTTCTCTGCAGAG | |
| | AGGCCTAAGGGATCTTTCTCCACCTTGGAGATCCAGCGCACAGAGCAGGGGGACTCGGCCATG | |
| | TATCTCTGTGCCAGCAGTGAAACTACGCTAAGTGAGCAGTTCTTCGGGCCAGGGACACGGCTC | |
| | ACCGTGCTAGAGGACCTGAAAAACGTGTTCCCACCCGAGGTCGCTGTGTTTGAGCCATCAGAA | |
| | GCAGAGATCTCCCACACCCAAAAGGCCACACTGGTATGCCTGGCCACAGGCTTCTACCCCGAC | |
| | CACGTGGAGCTGAGCTGGTGGGTGAATGGGAAGGAGGTGCACAGTGGGGTCAGCACAGACCCG | |
| | CAGCCCCTCAAGGAGCAGCCCGCCCTCAATGACTCCAGATACTGCCTGAGCAGCCGCCTGAGG | |
| | GTCTCGGCCACCTTCTGGCAGAACCCCCGCAACCACTTCCGCTGTCAAGTCCAGTTCTACGGG | |
| | CTCTCGGAGAATGACGAGTGGACCCAGGATAGGGCCAAACCTGTCACCCAGATCGTCAGCGCC | |
| | GAGGCCTGGGGTAGAGCAGACTGTGGCTTCACCTCCGAGTCTTACCAGCAAGGGGTCCTGTCT | |
| | GCCACCATCCTCTATGAGATCTTGCTAGGGAAGGCCACCTTGTATGCCGTGCTGGTCAGTGCC | |
| | CTCGTGCTGATGGCCATGGTCAAGAGAAAGGATTCCAGAGGCTAG | |
| 207 | MSIRALFIFLWLQLDLVNGENVEQHPSTLSVQEGDSAVIKCTYSDSASNYFPWYKQELGKRPQ | TCR N full |
| | LIIDIRSNVGEKKDQRIAVTLNKTAKHFSLHITETQPEDSAVYFCAAIVGNQFYFGTGTSLTV | construct aa |
| | IPNIQKPDPAVYQLRDSKSSDKSVCLFTDFDSQTNVSQSKDSDVYITDKTVLDMRSMDFKSNS | |
| | AVAWSNKSDFACANAFNNSIIPEDTFFPSPESSCDVKLVEKSFETDTNLNFQNLSVIGFRILL | |
| | LKVAGFNLLMTLRLWSSGSGATNFSLLKQAGDVEENPGPMGTSLLCWMALCLLGADHADTGVS | |
| | QDPRHKITKRGQNVTFRCDPISEHNRLYWYRQTLGQGPEFLTYFQNEAQLEKSRLLSDRFSAE | |
| | RPKGSFSTLEIQRTEQGDSAMYLCASSETTLSEQFFGPGTRLTVLEDLKNVEPPEVAVFEPSE | |
| | AEISHTQKATLVCLATGFYPDHVELSWWVNGKEVHSGVSTDPQPLKEQPALNDSRYCLSSRLR | |
| | VSATFWQNPRNHFRCQVQFYGLSENDEWTQDRAKPVTQIVSAEAWGRADCGFTSESYQQGVLS | |
| | ATILYEILLGKATLYAVLVSALVLMAMVKRKDSRG | |
| 208 | AMRNNNDMR | TCR O Vα |
| | | CDR-3 |
| 209 | GENVEQHPSTLSVQEGDSAVIKCTYSDSASNYFPWYKQELGKRPQLIIDIRSNVGEKKDQRIA | TCR O Vα |
| | VTLNKTAKHFSLHITETQPEDSAVYFCAMRNNNDMRFGAGTRLTVKPN | (aa) |
| 210 | MSIRAVFIFLWLQLDLVNGENVEQHPSTLSVQEGDSAVIKCTYSDSASNYFPWYKQELGKRPQ | TCR O Vα + |
| | LIIDIRSNVGEKKDQRIAVTLNKTAKHFSLHITETQPEDSAVYFCAMRNNNDMRFGAGTRLTV | ss (aa) |
| | KPN | |
| 211 | MSIRAVFIFLWLQLDLVNGENVEQHPSTLSVQEGDSAVIKCTYSDSASNYFPWYKQELGKRPQ | TCR O Vα + |
| | LIIDIRSNVGEKKDQRIAVTLNKTAKHFSLHITETQPEDSAVYFCAMRNNNDMRFGAGTRLTV | Cα (aa) |
| | KPNIQNPDPAVYQLRDSKSSDKSVCLFTDFDSQTNVSQSKDSDVYITDKTVLDMRSMDFKSNS | |
| | AVAWSNKSDFACANAFNNSIIPEDTFFPSPESSCDVKLVEKSFETDTNLNFQNLSVIGFRILL | |
| | LKVAGFNLLMTLRLWSS | |
| 212 | ATGTCCATTCGAGCTGTATTTATATTCCTGTGGCTGCAGCTGGACTTGGTGAATGGAGAGAAT | TCR O Vα |
| | GTGGAGCAGCATCCTTCAACCCTGAGTGTCCAGGAGGGAGACAGCGCTGTTATCAAGTGTACT | (nt) |
| | TATTCAGACAGTGCCTCAAACTACTTCCCTTGGTATAAGCAAGAACTTGGAAAAAGACCTCAG | |
| | CTTATTATAGACATTCGTTCAAATGTGGGCGAAAAGAAAGACCAACGAATTGCTGTTACATTG | |
| | AACAAGACAGCCAAACATTTCTCCCTGCACATCACAGAGACCCAACCTGAAGACTCGGCTGTC | |
| | TACTTCTGTGCAATGAGAAATAACAATGACATGCGCTTTGGAGCAGGGACCAGACTGACAGTA | |
| | AAACCAAAT | |
| 213 | ATGTCCATTCGAGCTGTATTTATATTCCTGTGGCTGCAGCTGGACTTGGTGAATGGAGAGAAT | TCR O Vα + |
| | GTGGAGCAGCATCCTTCAACCCTGAGTGTCCAGGAGGGAGACAGCGCTGTTATCAAGTGTACT | Cα (nt) |
| | TATTCAGACAGTGCCTCAAACTACTTCCCTTGGTATAAGCAAGAACTTGGAAAAAGACCTCAG | |
| | CTTATTATAGACATTCGTTCAAATGTGGGCGAAAAGAAAGACCAACGAATTGCTGTTACATTG | |
| | AACAAGACAGCCAAACATTTCTCCCTGCACATCACAGAGACCCAACCTGAAGACTCGGCTGTC | |
| | TACTTCTGTGCAATGAGAAATAACAATGACATGCGCTTTGGAGCAGGGACCAGACTGACAGTA | |
| | AAACCAAATATCCAGAACCCTGACCCTGCCGTGTACCAGCTGAGAGACTCTAAATCCAGTGAC | |
| | AAGTCTGTCTGCCTATTCACCGATTTTGATTCTCAAACAAATGTGTCACAAAGTAAGGATTCT | |
| | GATGTGTATATCACAGACAAAACTGTGCTAGACATGAGGTCTATGGACTTCAAGAGCAACAGT | |
| | GCTGTGGCCTGGAGCAACAAATCTGACTTTGCATGTGCAAACGCCTTCAACAACAGCATTATT | |
| | CCAGAAGACACCTTCTTCCCCAGCCCAGAAAGTTCCTGTGATGTCAAGCTGGTCGAGAAAAGC | |
| | TTTGAAACAGATACGAACCTAAACTTTCAAAACCTGTCAGTGATTGGGTTCCGAATCCTCCTC | |
| | CTGAAAGTGGCCGGGTTTAATCTGCTCATGACGCTGCGGCTGTGGTCCAGC | |
| 214 | ASSLTTLDTQY | TCR O Vβ |
| | | CDR-3 |
| 215 | DTGVSQDPRHKITKRGQNVTFRCDPISEHNRLYWYRQTLGQGPEFLTYFQNEAQLEKSRLLSD | TCR O Vβ |
| | RFSAERPKGSFSTLEIQRTEQGDSAMYLCASSLTTLDTQYFGPGTRLTVL | (aa) |
| 216 | MGTSLLCWMALCLLGADHADTGVSQDPRHKITKRGQNVTFRCDPISEHNRLYWYRQTLGQGPE | TCR O Vβ + |
| | FLTYFQNEAQLEKSRLLSDRFSAERPKGSFSTLEIQRTEQGDSAMYLCASSLTTLDTQYFGPG | ss (aa) |
| | TRLTVL | |
| 217 | MGTSLLCWMALCLLGADHADTGVSQDPRHKITKRGQNVTFRCDPISEHNRLYWYRQTLGQGPE | TCR O Vβ + |
| | FLTYFQNEAQLEKSRLLSDRFSAERPKGSFSTLEIQRTEQGDSAMYLCASSLTTLDTQYFGPG | Cβ (aa) |
| | TRLTVLEDLKNVFPPEVAVFEPSEAEISHTQKATLVCLATGFYPDHVELSWWVNGKEVHSGVS | |
| | TDPQPLKEQPALNDSRYCLSSRLRVSATFWQNPRNHFRCQVQFYGLSENDEWTQDRAKPVTQI | |
| | VSAEAWGRADCGFTSESYQQGVLSATILYEILLGKATLYAVLVSALVLMAMVKRKDSRG | |
| 218 | ATGGGTACCAGCCTCCTCTGCTGGATGGCCCTGTGTCTCCTGGGGGCAGATCACGCAGATACT | TCR O Vβ |
| | GGAGTCTCCCAGGACCCCAGACACAAGATCACAAAGAGGGGACAGAATGTAACTTTCAGGTGT | (nt) |
| | GATCCAATTTCTGAACACAACCGCCTTTATTGGTACCGACAGACCCTGGGGCAGGGCCCAGAG | |
| | TTTCTGACTTACTTCCAGAATGAAGCTCAACTAGAAAAATCAAGGCTGCTCAGTGATCGGTTC | |
| | TCTGCAGAGAGGCCTAAGGGATCTTTCTCCACCTTGGAGATCCAGCGCACAGAGCAGGGGGAC | |
| | TCGGCCATGTATCTCTGTGCCAGCAGCTTAACAACATTGGATACGCAGTATTTTGGCCCAGGC | |
| | ACCCGGCTGACAGTGCTCGAG | |
| 219 | ATGGGTACCAGCCTCCTCTGCTGGATGGCCCTGTGTCTCCTGGGGGCAGATCACGCAGATACT | TCR O Vβ + |
| | GGAGTCTCCCAGGACCCCAGACACAAGATCACAAAGAGGGGACAGAATGTAACTTTCAGGTGT | Cβ (nt) |
| | GATCCAATTTCTGAACACAACCGCCTTTATTGGTACCGACAGACCCTGGGGCAGGGCCCAGAG | |
| | TTTCTGACTTACTTCCAGAATGAAGCTCAACTAGAAAAATCAAGGCTGCTCAGTGATCGGTTC | |
| | TCTGCAGAGAGGCCTAAGGGATCTTTCTCCACCTTGGAGATCCAGCGCACAGAGCAGGGGGAC | |
| | TCGGCCATGTATCTCTGTGCCAGCAGCTTAACAACATTGGATACGCAGTATTTTGGCCCAGGC | |
| | ACCCGGCTGACAGTGCTCGAGGACCTGAAAAACGTGTTCCCACCCGAGGTCGCTGTGTTTGAG | |
| | CCATCAGAAGCAGAGATCTCCCACACCCAAAAGGCCACACTGGTATGCCTGGCCACAGGCTTC | |
| | TACCCCGACCACGTGGAGCTGAGCTGGTGGGTGAATGGGAAGGAGGTGCACAGTGGGGTCAGC | |
| | ACAGACCCGCAGCCCCTCAAGGAGCAGCCCGCCCTCAATGACTCCAGATACTGCCTGAGCAGC | |
| | CGCCTGAGGGTCTCGGCCACCTTCTGGCAGAACCCCCGCAACCACTTCCGCTGTCAAGTCCAG | |
| | TTCTACGGGCTCTCGGAGAATGACGAGTGGACCCAGGATAGGGCCAAACCTGTCACCCAGATC | |
| | GTCAGCGCCGAGGCCTGGGGTAGAGCAGACTGTGGCTTCACCTCCGAGTCTTACCAGCAAGGG | |
| | GTCCTGTCTGCCACCATCCTCTATGAGATCTTGCTAGGGAAGGCCACCTTGTATGCCGTGCTG | |
| | GTCAGTGCCCTCGTGCTGATGGCCATGGTCAAGAGAAAGGATTCCAGAGGCTAG | |
| 220 | ATGTCCATTCGAGCTGTATTTATATTCCTGTGGCTGCAGCTGGACTTGGTGAATGGAGAGAAT | TCR O full |
| | GTGGAGCAGCATCCTTCAACCCTGAGTGTCCAGGAGGGAGACAGCGCTGTTATCAAGTGTACT | construct nt |
| | TATTCAGACAGTGCCTCAAACTACTTCCCTTGGTATAAGCAAGAACTTGGAAAAAGACCTCAG | |
| | CTTATTATAGACATTCGTTCAAATGTGGGCGAAAAGAAAGACCAACGAATTGCTGTTACATTG | |
| | AACAAGACAGCCAAACATTTCTCCCTGCACATCACAGAGACCCAACCTGAAGACTCGGCTGTC | |
| | TACTTCTGTGCAATGAGAAATAACAATGACATGCGCTTTGGAGCAGGGACCAGACTGACAGTA | |
| | AAACCAAATATCCAGAACCCTGACCCTGCCGTGTACCAGCTGAGAGACTCTAAATCCAGTGAC | |
| | AAGTCTGTCTGCCTATTCACCGATTTTGATTCTCAAACAAATGTGTCACAAAGTAAGGATTCT | |
| | GATGTGTATATCACAGACAAAACTGTGCTAGACATGAGGTCTATGGACTTCAAGAGCAACAGT | |
| | GCTGTGGCCTGGAGCAACAAATCTGACTTTGCATGTGCAAACGCCTTCAACAACAGCATTATT | |
| | CCAGAAGACACCTTCTTCCCCAGCCCAGAAAGTTCCTGTGATGTCAAGCTGGTCGAGAAAAGC | |
| | TTTGAAACAGATACGAACCTAAACTTTCAAAACCTGTCAGTGATTGGGTTCCGAATCCTCCTC | |
| | CTGAAAGTGGCCGGGTTTAATCTGCTCATGACGCTGCGGCTGTGGTCCAGCGGCTCCGGAGCC | |
| | ACGAACTTCTCTCTGTTAAAGCAAGCAGGAGACGTGGAAGAAAACCCCGGTCCCATGGGTACC | |
| | AGCCTCCTCTGCTGGATGGCCCTGTGTCTCCTGGGGGCAGATCACGCAGATACTGGAGTCTCC | |
| | CAGGACCCCAGACACAAGATCACAAAGAGGGGACAGAATGTAACTTTCAGGTGTGATCCAATT | |
| | TCTGAACACAACCGCCTTTATTGGTACCGACAGACCCTGGGGCAGGGCCCAGAGTTTCTGACT | |
| | TACTTCCAGAATGAAGCTCAACTAGAAAAATCAAGGCTGCTCAGTGATCGGTTCTCTGCAGAG | |
| | AGGCCTAAGGGATCTTTCTCCACCTTGGAGATCCAGCGCACAGAGCAGGGGGACTCGGCCATG | |
| | TATCTCTGTGCCAGCAGCTTAACAACATTGGATACGCAGTATTTTGGCCCAGGCACCCGGCTG | |
| | ACAGTGCTCGAGGACCTGAAAAACGTGTTCCCACCCGAGGTCGCTGTGTTTGAGCCATCAGAA | |
| | GCAGAGATCTCCCACACCCAAAAGGCCACACTGGTATGCCTGGCCACAGGCTTCTACCCCGAC | |
| | CACGTGGAGCTGAGCTGGTGGGTGAATGGGAAGGAGGTGCACAGTGGGGTCAGCACAGACCCG | |
| | CAGCCCCTCAAGGAGCAGCCCGCCCTCAATGACTCCAGATACTGCCTGAGCAGCCGCCTGAGG | |
| | GTCTCGGCCACCTTCTGGCAGAACCCCCGCAACCACTTCCGCTGTCAAGTCCAGTTCTACGGG | |
| | CTCTCGGAGAATGACGAGTGGACCCAGGATAGGGCCAAACCTGTCACCCAGATCGTCAGCGCC | |
| | GAGGCCTGGGGTAGAGCAGACTGTGGCTTCACCTCCGAGTCTTACCAGCAAGGGGTCCTGTCT | |
| | GCCACCATCCTCTATGAGATCTTGCTAGGGAAGGCCACCTTGTATGCCGTGCTGGTCAGTGCC | |
| | CTCGTGCTGATGGCCATGGTCAAGAGAAAGGATTCCAGAGGCTAG | |
| 221 | MSIRAVFIFLWLQLDLVNGENVEQHPSTLSVQEGDSAVIKCTYSDSASNYFPWYKQELGKRPQ | TCR O full |
| | LIIDIRSNVGEKKDQRIAVTLNKTAKHFSLHITETQPEDSAVYFCAMRNNNDMRFGAGTRLTV | construct aa |
| | KPNIQNPDPAVYQLRDSKSSDKSVCLFTDFDSQTNVSQSKDSDVYITDKTVLDMRSMDFKSNS | |
| | AVAWSNKSDFACANAFNNSIIPEDTFFPSPESSCDVKLVEKSFETDTNLNFQNLSVIGFRILL | |
| | LKVAGFNLLMTLRLWSSGSGATNFSLLKQAGDVEENPGPMGTSLLCWMALCLLGADHADTGVS | |
| | QDPRHKITKRGQNVTFRCDPISEHNRLYWYRQTLGQGPEFLTYFQNEAQLEKSRLLSDRFSAE | |
| | RPKGSFSTLEIQRTEQGDSAMYLCASSLTTLDTQYFGPGTRLTVLEDLKNVEPPEVAVFEPSE | |
| | AEISHTQKATLVCLATGFYPDHVELSWWVNGKEVHSGVSTDPQPLKEQPALNDSRYCLSSRLR | |
| | VSATFWQNPRNHFRCQVQFYGLSENDEWTQDRAKPVTQIVSAEAWGRADCGFTSESYQQGVLS | |
| | ATILYEILLGKATLYAVLVSALVLMAMVKRKDSRG | |
| 222 | YGGTVN | TCR P Vα |
| | | CDR-1 |
| 223 | YFSGDPLV | TCR P Vα |
| | | CDR-2 |
| 224 | AVRDSGAGSYQLT | TCR P Vα |
| | | CDR-3 |
| 225 | AQSVSQHNHHVILSEAASLELGCNYSYGGTVNLFWYVQYPGQHLQLLLKYFSGDPLVKGIKGF | TCR P Vα |
| | EAEFIKSKFSFNLRKPSVQWSDTAEYFCAVRDSGAGSYQLTFGKGTKLSVIPN | (aa) |
| 226 | MLLLLIPVLGMIFALRDARAQSVSQHNHHVILSEAASLELGCNYSYGGTVNLFWYVQYPGQHL | TCR P Vα + |
| | QLLLKYFSGDPLVKGIKGFEAEFIKSKFSFNLRKPSVQWSDTAEYFCAVRDSGAGSYQLTFGK | ss (aa) |
| | GTKLSVIPN | |
| 227 | MLLLLIPVLGMIFALRDARAQSVSQHNHHVILSEAASLELGCNYSYGGTVNLFWYVQYPGQHL | TCR P Vα + |
| | QLLLKYFSGDPLVKGIKGFEAEFIKSKFSFNLRKPSVQWSDTAEYFCAVRDSGAGSYQLTFGK | Cα (aa) |
| | GTKLSVIPNIQNPDPAVYQLRDSKSSDKSVCLFTDFDSQTNVSQSKDSDVYITDKTVLDMRSM | |
| | DFKSNSAVAWSNKSDFACANAFNNSIIPEDTFFPSPESSCDVKLVEKSFETDTNLNFQNLSVI | |
| | GFRILLLKVAGFNLLMTLRLWSS | |
| 228 | ATGCTCCTGTTGCTCATACCAGTGCTGGGGATGATTTTTGCCCTGAGAGATGCCAGAGCCCAG | TCR P Vα |
| | TCTGTGAGCCAGCATAACCACCACGTAATTCTCTCTGAAGCAGCCTCACTGGAGTTGGGATGC | (nt) |
| | AACTATTCCTATGGTGGAACTGTTAATCTCTTCTGGTATGTCCAGTACCCTGGTCAACACCTT | |
| | CAGCTTCTCCTCAAGTACTTTTCAGGGGATCCACTGGTTAAAGGCATCAAGGGCTTTGAGGCT | |
| | GAATTTATAAAGAGTAAATTCTCCTTTAATCTGAGGAAACCCTCTGTGCAGTGGAGTGACACA | |
| | GCTGAGTACTTCTGTGCCGTGAGGGACTCTGGGGCTGGGAGTTACCAACTCACTTTCGGGAAG | |
| | GGGACCAAACTCTCGGTCATACCAAAT | |
| 229 | ATGCTCCTGTTGCTCATACCAGTGCTGGGGATGATTTTTGCCCTGAGAGATGCCAGAGCCCAG | TCR P Vα + |
| | TCTGTGAGCCAGCATAACCACCACGTAATTCTCTCTGAAGCAGCCTCACTGGAGTTGGGATGC | Cα (nt) |
| | AACTATTCCTATGGTGGAACTGTTAATCTCTTCTGGTATGTCCAGTACCCTGGTCAACACCTT | |
| | CAGCTTCTCCTCAAGTACTTTTCAGGGGATCCACTGGTTAAAGGCATCAAGGGCTTTGAGGCT | |
| | GAATTTATAAAGAGTAAATTCTCCTTTAATCTGAGGAAACCCTCTGTGCAGTGGAGTGACACA | |
| | GCTGAGTACTTCTGTGCCGTGAGGGACTCTGGGGCTGGGAGTTACCAACTCACTTTCGGGAAG | |
| | GGGACCAAACTCTCGGTCATACCAAATATCCAGAACCCTGACCCTGCCGTGTACCAGCTGAGA | |
| | GACTCTAAATCCAGTGACAAGTCTGTCTGCCTATTCACCGATTTTGATTCTCAAACAAATGTG | |
| | TCACAAAGTAAGGATTCTGATGTGTATATCACAGACAAAACTGTGCTAGACATGAGGTCTATG | |
| | GACTTCAAGAGCAACAGTGCTGTGGCCTGGAGCAACAAATCTGACTTTGCATGTGCAAACGCC | |
| | TTCAACAACAGCATTATTCCAGAAGACACCTTCTTCCCCAGCCCAGAAAGTTCCTGTGATGTC | |
| | AAGCTGGTCGAGAAAAGCTTTGAAACAGATACGAACCTAAACTTTCAAAACCTGTCAGTGATT | |
| | GGGTTCCGAATCCTCCTCCTGAAAGTGGCCGGGTTTAATCTGCTCATGACGCTGCGGCTGTGG | |
| | TCCAGC | |
| 230 | ASLTGTVYNEQF | TCR P Vβ |
| | | CDR-3 |
| 231 | DTGVSQDPRHKITKRGQNVTFRCDPISEHNRLYWYRQTLGQGPEFLTYFQNEAQLEKSRLLSD | TCR P Vβ |
| | RFSAERPKGSFSTLEIQRTEQGDSAMYLCASLTGTVYNEQFFGPGTRLTVLE | (aa) |
| 232 | MGTSLLCWMALCLLGADHADTGVSQDPRHKITKRGQNVTFRCDPISEHNRLYWYRQTLGQGPE | TCR P Vβ + |
| | FLTYFQNEAQLEKSRLLSDRFSAERPKGSFSTLEIQRTEQGDSAMYLCASLTGTVYNEQFFGP | ss (aa) |
| | GTRLTVLE | |
| 233 | MGTSLLCWMALCLLGADHADTGVSQDPRHKITKRGQNVTFRCDPISEHNRLYWYRQTLGQGPE | TCR P Vβ + |
| | FLTYFQNEAQLEKSRLLSDRFSAERPKGSFSTLEIQRTEQGDSAMYLCASLTGTVYNEQFFGP | Cβ (aa) |
| | GTRLTVLEDLKNVFPPEVAVFEPSEAEISHTQKATLVCLATGFYPDHVELSWWVNGKEVHSGV | |
| | STDPQPLKEQPALNDSRYCLSSRLRVSATFWQNPRNHFRCQVQFYGLSENDEWTQDRAKPVTQ | |
| | IVSAEAWGRADCGFTSESYQQGVLSATILYEILLGKATLYAVLVSALVLMAMVKRKDSRG | |
| 234 | ATGGGTACCAGCCTCCTCTGCTGGATGGCCCTGTGTCTCCTGGGGGCAGATCACGCAGATACT | TCR P Vβ |
| | GGAGTCTCCCAGGACCCCAGACACAAGATCACAAAGAGGGGACAGAATGTAACTTTCAGGTGT | (nt) |
| | GATCCAATTTCTGAACACAACCGCCTTTATTGGTACCGACAGACCCTGGGGCAGGGCCCAGAG | |
| | TTTCTGACTTACTTCCAGAATGAAGCTCAACTAGAAAAATCAAGGCTGCTCAGTGATCGGTTC | |
| | TCTGCAGAGAGGCCTAAGGGATCTTTCTCCACCTTGGAGATCCAGCGCACAGAGCAGGGGGAC | |
| | TCGGCCATGTATCTCTGTGCCAGCCTTACCGGGACAGTCTACAATGAGCAGTTCTTCGGGCCA | |
| | GGGACACGGCTCACCGTGCTAGAG | |
| 235 | ATGGGTACCAGCCTCCTCTGCTGGATGGCCCTGTGTCTCCTGGGGGCAGATCACGCAGATACT | TCR P Vβ + |
| | GGAGTCTCCCAGGACCCCAGACACAAGATCACAAAGAGGGGACAGAATGTAACTTTCAGGTGT | Cβ (nt) |
| | GATCCAATTTCTGAACACAACCGCCTTTATTGGTACCGACAGACCCTGGGGCAGGGCCCAGAG | |
| | TTTCTGACTTACTTCCAGAATGAAGCTCAACTAGAAAAATCAAGGCTGCTCAGTGATCGGTTC | |
| | TCTGCAGAGAGGCCTAAGGGATCTTTCTCCACCTTGGAGATCCAGCGCACAGAGCAGGGGGAC | |
| | TCGGCCATGTATCTCTGTGCCAGCCTTACCGGGACAGTCTACAATGAGCAGTTCTTCGGGCCA | |
| | GGGACACGGCTCACCGTGCTAGAGGACCTGAAAAACGTGTTCCCACCCGAGGTCGCTGTGTTT | |
| | GAGCCATCAGAAGCAGAGATCTCCCACACCCAAAAGGCCACACTGGTATGCCTGGCCACAGGC | |
| | TTCTACCCCGACCACGTGGAGCTGAGCTGGTGGGTGAATGGGAAGGAGGTGCACAGTGGGGTC | |
| | AGCACAGACCCGCAGCCCCTCAAGGAGCAGCCCGCCCTCAATGACTCCAGATACTGCCTGAGC | |
| | AGCCGCCTGAGGGTCTCGGCCACCTTCTGGCAGAACCCCCGCAACCACTTCCGCTGTCAAGTC | |
| | CAGTTCTACGGGCTCTCGGAGAATGACGAGTGGACCCAGGATAGGGCCAAACCTGTCACCCAG | |
| | ATCGTCAGCGCCGAGGCCTGGGGTAGAGCAGACTGTGGCTTCACCTCCGAGTCTTACCAGCAA | |
| | GGGGTCCTGTCTGCCACCATCCTCTATGAGATCTTGCTAGGGAAGGCCACCTTGTATGCCGTG | |
| | CTGGTCAGTGCCCTCGTGCTGATGGCCATGGTCAAGAGAAAGGATTCCAGAGGCTAG | |
| 236 | ATGCTCCTGTTGCTCATACCAGTGCTGGGGATGATTTTTGCCCTGAGAGATGCCAGAGCCCAG | TCR P full |
| | TCTGTGAGCCAGCATAACCACCACGTAATTCTCTCTGAAGCAGCCTCACTGGAGTTGGGATGC | construct nt |
| | AACTATTCCTATGGTGGAACTGTTAATCTCTTCTGGTATGTCCAGTACCCTGGTCAACACCTT | |
| | CAGCTTCTCCTCAAGTACTTTTCAGGGGATCCACTGGTTAAAGGCATCAAGGGCTTTGAGGCT | |
| | GAATTTATAAAGAGTAAATTCTCCTTTAATCTGAGGAAACCCTCTGTGCAGTGGAGTGACACA | |
| | GCTGAGTACTTCTGTGCCGTGAGGGACTCTGGGGCTGGGAGTTACCAACTCACTTTCGGGAAG | |
| | GGGACCAAACTCTCGGTCATACCAAATATCCAGAACCCTGACCCTGCCGTGTACCAGCTGAGA | |
| | GACTCTAAATCCAGTGACAAGTCTGTCTGCCTATTCACCGATTTTGATTCTCAAACAAATGTG | |
| | TCACAAAGTAAGGATTCTGATGTGTATATCACAGACAAAACTGTGCTAGACATGAGGTCTATG | |
| | GACTTCAAGAGCAACAGTGCTGTGGCCTGGAGCAACAAATCTGACTTTGCATGTGCAAACGCC | |
| | TTCAACAACAGCATTATTCCAGAAGACACCTTCTTCCCCAGCCCAGAAAGTTCCTGTGATGTC | |
| | AAGCTGGTCGAGAAAAGCTTTGAAACAGATACGAACCTAAACTTTCAAAACCTGTCAGTGATT | |
| | GGGTTCCGAATCCTCCTCCTGAAAGTGGCCGGGTTTAATCTGCTCATGACGCTGCGGCTGTGG | |
| | TCCAGCGGCTCCGGAGCCACGAACTTCTCTCTGTTAAAGCAAGCAGGAGACGTGGAAGAAAAC | |
| | CCCGGTCCCATGGGTACCAGCCTCCTCTGCTGGATGGCCCTGTGTCTCCTGGGGGCAGATCAC | |
| | GCAGATACTGGAGTCTCCCAGGACCCCAGACACAAGATCACAAAGAGGGGACAGAATGTAACT | |
| | TTCAGGTGTGATCCAATTTCTGAACACAACCGCCTTTATTGGTACCGACAGACCCTGGGGCAG | |
| | GGCCCAGAGTTTCTGACTTACTTCCAGAATGAAGCTCAACTAGAAAAATCAAGGCTGCTCAGT | |
| | GATCGGTTCTCTGCAGAGAGGCCTAAGGGATCTTTCTCCACCTTGGAGATCCAGCGCACAGAG | |
| | CAGGGGGACTCGGCCATGTATCTCTGTGCCAGCCTTACCGGGACAGTCTACAATGAGCAGTTC | |
| | TTCGGGCCAGGGACACGGCTCACCGTGCTAGAGGACCTGAAAAACGTGTTCCCACCCGAGGTC | |
| | GCTGTGTTTGAGCCATCAGAAGCAGAGATCTCCCACACCCAAAAGGCCACACTGGTATGCCTG | |
| | GCCACAGGCTTCTACCCCGACCACGTGGAGCTGAGCTGGTGGGTGAATGGGAAGGAGGTGCAC | |
| | AGTGGGGTCAGCACAGACCCGCAGCCCCTCAAGGAGCAGCCCGCCCTCAATGACTCCAGATAC | |
| | TGCCTGAGCAGCCGCCTGAGGGTCTCGGCCACCTTCTGGCAGAACCCCCGCAACCACTTCCGC | |
| | TGTCAAGTCCAGTTCTACGGGCTCTCGGAGAATGACGAGTGGACCCAGGATAGGGCCAAACCT | |
| | GTCACCCAGATCGTCAGCGCCGAGGCCTGGGGTAGAGCAGACTGTGGCTTCACCTCCGAGTCT | |
| | TACCAGCAAGGGGTCCTGTCTGCCACCATCCTCTATGAGATCTTGCTAGGGAAGGCCACCTTG | |
| | TATGCCGTGCTGGTCAGTGCCCTCGTGCTGATGGCCATGGTCAAGAGAAAGGATTCCAGAGGC | |
| | TAG | |
| 237 | MLLLLIPVLGMIFALRDARAQSVSQHNHHVILSEAASLELGCNYSYGGTVNLFWYVQYPGQHL | TCR P full |
| | QLLLKYFSGDPLVKGIKGFEAEFIKSKFSFNLRKPSVQWSDTAEYFCAVRDSGAGSYQLTFGK | construct aa |
| | GTKLSVIPNIQNPDPAVYQLRDSKSSDKSVCLFTDFDSQTNVSQSKDSDVYITDKTVLDMRSM | |
| | DFKSNSAVAWSNKSDFACANAFNNSIIPEDTFFPSPESSCDVKLVEKSFETDTNLNFQNLSVI | |
| | GFRILLLKVAGFNLLMTLRLWSSGSGATNFSLLKQAGDVEENPGPMGTSLLCWMALCLLGADH | |
| | ADTGVSQDPRHKITKRGQNVTFRCDPISEHNRLYWYRQTLGQGPEFLTYFQNEAQLEKSRLLS | |
| | DRFSAERPKGSFSTLEIQRTEQGDSAMYLCASLTGTVYNEQFFGPGTRLTVLEDLKNVFPPEV | |
| | AVFEPSEAEISHTQKATLVCLATGFYPDHVELSWWVNGKEVHSGVSTDPQPLKEQPALNDSRY | |
| | CLSSRLRVSATFWQNPRNHFRCQVQFYGLSENDEWTQDRAKPVTQIVSAEAWGRADCGFTSES | |
| | YQQGVLSATILYEILLGKATLYAVLVSALVLMAMVKRKDSRG | |
| 238 | AASNPTGANSKLT | TCR Q Vα |
| | | CDR-3 |
| 239 | GENVEQHPSTLSVQEGDSAVIKCTYSDSASNYFPWYKQELGKRPQLIIDIRSNVGEKKDQRIA | TCR Q Vα |
| | VTLNKTAKHFSLHITETQPEDSAVYFCAASNPTGANSKLTFGKGITLSVRPD | (aa) |
| 240 | MSIRAVFIFLWLQLDLVNGENVEQHPSTLSVQEGDSAVIKCTYSDSASNYFPWYKQELGKRPQ | TCR Q Vα + |
| | LIIDIRSNVGEKKDQRIAVTLNKTAKHFSLHITETQPEDSAVYFCAASNPTGANSKLTFGKGI | ss (aa) |
| | TLSVRPD | |
| 241 | MSIRAVFIFLWLQLDLVNGENVEQHPSTLSVQEGDSAVIKCTYSDSASNYFPWYKQELGKRPQ | TCR Q Vα + |
| | LIIDIRSNVGEKKDQRIAVTLNKTAKHFSLHITETQPEDSAVYFCAASNPTGANSKLTFGKGI | Cα (aa) |
| | TLSVRPDIQKPDPAVYQLRDSKSSDKSVCLFTDFDSQTNVSQSKDSDVYITDKTVLDMRSMDF | |
| | KSNSAVAWSNKSDFACANAFNNSIIPEDTFFPSPESSCDVKLVEKSFETDTNLNFQNLSVIGF | |
| | RILLLKVAGFNLLMTLRLWSS | |
| 242 | ATGTCCATTCGAGCTGTATTTATATTCCTGTGGCTGCAGCTGGACTTGGTGAATGGAGAGAAT | TCR Q Vα |
| | GTGGAGCAGCATCCTTCAACCCTGAGTGTCCAGGAGGGAGACAGCGCTGTTATCAAGTGTACT | (nt) |
| | TATTCAGACAGTGCCTCAAACTACTTCCCTTGGTATAAGCAAGAACTTGGAAAAAGACCTCAG | |
| | CTTATTATAGACATTCGTTCAAATGTGGGCGAAAAGAAAGACCAACGAATTGCTGTTACATTG | |
| | AACAAGACAGCCAAACATTTCTCCCTGCACATCACAGAGACCCAACCTGAAGACTCGGCTGTC | |
| | TACTTCTGTGCAGCAAGTAACCCTACTGGAGCCAATAGTAAGCTGACATTTGGAAAAGGAATA | |
| | ACTCTGAGTGTTAGACCAGAT | |
| 243 | ATGTCCATTCGAGCTGTATTTATATTCCTGTGGCTGCAGCTGGACTTGGTGAATGGAGAGAAT | TCR Q Vα + |
| | GTGGAGCAGCATCCTTCAACCCTGAGTGTCCAGGAGGGAGACAGCGCTGTTATCAAGTGTACT | Cα (nt) |
| | TATTCAGACAGTGCCTCAAACTACTTCCCTTGGTATAAGCAAGAACTTGGAAAAAGACCTCAG | |
| | CTTATTATAGACATTCGTTCAAATGTGGGCGAAAAGAAAGACCAACGAATTGCTGTTACATTG | |
| | AACAAGACAGCCAAACATTTCTCCCTGCACATCACAGAGACCCAACCTGAAGACTCGGCTGTC | |
| | TACTTCTGTGCAGCAAGTAACCCTACTGGAGCCAATAGTAAGCTGACATTTGGAAAAGGAATA | |
| | ACTCTGAGTGTTAGACCAGATATCCAGAAGCCTGACCCTGCCGTGTACCAGCTGAGAGACTCT | |
| | AAATCCAGTGACAAGTCTGTCTGCCTATTCACCGATTTTGATTCTCAAACAAATGTGTCACAA | |
| | AGTAAGGATTCTGATGTGTATATCACAGACAAAACTGTGCTAGACATGAGGTCTATGGACTTC | |
| | AACAGCATTATTCCAGAAGACACCTTCTTCCCCAGCCCAGAAAGTTCCTGTGATGTCAAGCTG | |
| | AAGAGCAACAGTGCTGTGGCCTGGAGCAACAAATCTGACTTTGCATGTGCAAACGCCTTCAAC | |
| | AACAGCATTATTCCAGAAGACACCTTCTTCCCCAGCCCAGAAAGTTCCTGTGATGTCAAGCTG | |
| | GTCGAGAAAAGCTTTGAAACAGATACGAACCTAAACTTTCAAAACCTGTCAGTGATTGGGTTC | |
| | CGAATCCTCCTCCTGAAAGTGGCCGGGTTTAATCTGCTCATGACGCTGCGGCTGTGGTCCAGC | |
| 244 | ASSLVRNEKLE | TCR Q Vβ |
| | | CDR-3 |
| 245 | DTGVSQDPRHKITKRGQNVTFRCDPISEHNRLYWYRQTLGQGPEFLTYFQNEAQLEKSRLLSD | TCR Q Vβ |
| | RFSAERPKGSFSTLEIQRTEQGDSAMYLCASSLVRNEKLFFGSGTQLSVLE | (aa) |
| 246 | MGTSLLCWMALCLLGADHADTGVSQDPRHKITKRGQNVTFRCDPISEHNRLYWYRQTLGQGPE | TCR Q Vβ + |
| | FLTYFQNEAQLEKSRLLSDRFSAERPKGSFSTLEIQRTEQGDSAMYLCASSLVRNEKLFFGSG | ss (aa) |
| | TQLSVLE | |
| 247 | MGTSLLCWMALCLLGADHADTGVSQDPRHKITKRGQNVTFRCDPISEHNRLYWYRQTLGQGPE | TCR Q Vβ + |
| | FLTYFQNEAQLEKSRLLSDRFSAERPKGSFSTLEIQRTEQGDSAMYLCASSLVRNEKLFFGSG | Cß (aa) |
| | TQLSVLEDLNKVFPPEVAVFEPSEAEISHTQKATLVCLATGFFPDHVELSWWVNGKEVHSGVS | |
| | TDPQPLKEQPALNDSRYCLSSRLRVSATFWQNPRNHERCQVQFYGLSENDEWTQDRAKPVTQI | |
| | VSAEAWGRADCGFTSVSYQQGVLSATILYEILLGKATLYAVLVSALVLMAMVKRKDF | |
| 248 | ATGGGTACCAGCCTCCTCTGCTGGATGGCCCTGTGTCTCCTGGGGGCAGATCACGCAGATACT | TCR Q Vβ |
| | GGAGTCTCCCAGGACCCCAGACACAAGATCACAAAGAGGGGACAGAATGTAACTTTCAGGTGT | (nt) |
| | GATCCAATTTCTGAACACAACCGCCTTTATTGGTACCGACAGACCCTGGGGCAGGGCCCAGAG | |
| | TTTCTGACTTACTTCCAGAATGAAGCTCAACTAGAAAAATCAAGGCTGCTCAGTGATCGGTTC | |
| | TCTGCAGAGAGGCCTAAGGGATCTTTCTCCACCTTGGAGATCCAGCGCACAGAGCAGGGGGAC | |
| | TCGGCCATGTATCTCTGTGCCAGCAGCTTAGTCCGAAATGAAAAACTGTTTTTTGGCAGTGGA | |
| | ACCCAGCTCTCTGTCTTGGAG | |
| 249 | ATGGGTACCAGCCTCCTCTGCTGGATGGCCCTGTGTCTCCTGGGGGCAGATCACGCAGATACT | TCR Q Vβ + |
| | GGAGTCTCCCAGGACCCCAGACACAAGATCACAAAGAGGGGACAGAATGTAACTTTCAGGTGT | Cß (nt) |
| | GATCCAATTTCTGAACACAACCGCCTTTATTGGTACCGACAGACCCTGGGGCAGGGCCCAGAG | |
| | TTTCTGACTTACTTCCAGAATGAAGCTCAACTAGAAAAATCAAGGCTGCTCAGTGATCGGTTC | |
| | TCTGCAGAGAGGCCTAAGGGATCTTTCTCCACCTTGGAGATCCAGCGCACAGAGCAGGGGGAC | |
| | TCGGCCATGTATCTCTGTGCCAGCAGCTTAGTCCGAAATGAAAAACTGTTTTTTGGCAGTGGA | |
| | ACCCAGCTCTCTGTCTTGGAGGACCTGAACAAGGTGTTCCCACCCGAGGTCGCTGTGTTTGAG | |
| | CCATCAGAAGCAGAGATCTCCCACACCCAAAAGGCCACACTGGTGTGCCTGGCCACAGGCTTC | |
| | TTCCCCGACCACGTGGAGCTGAGCTGGTGGGTGAATGGGAAGGAGGTGCACAGTGGGGTCAGC | |
| | ACAGACCCGCAGCCCCTCAAGGAGCAGCCCGCCCTCAATGACTCCAGATACTGCCTGAGCAGC | |
| | CGCCTGAGGGTCTCGGCCACCTTCTGGCAGAACCCCCGCAACCACTTCCGCTGTCAAGTCCAG | |
| | TTCTACGGGCTCTCGGAGAATGACGAGTGGACCCAGGATAGGGCCAAACCCGTCACCCAGATC | |
| | GTCAGCGCCGAGGCCTGGGGTAGAGCAGACTGTGGCTTTACCTCGGTGTCCTACCAGCAAGGG | |
| | GTCCTGTCTGCCACCATCCTCTATGAGATCCTGCTAGGGAAGGCCACCCTGTATGCTGTGCTG | |
| | GTCAGCGCCCTTGTGTTGATGGCCATGGTCAAGAGAAAGGATTTCTGA | |
| 250 | ATGTCCATTCGAGCTGTATTTATATTCCTGTGGCTGCAGCTGGACTTGGTGAATGGAGAGAAT | TCR Q full |
| | GTGGAGCAGCATCCTTCAACCCTGAGTGTCCAGGAGGGAGACAGCGCTGTTATCAAGTGTACT | construct nt |
| | TATTCAGACAGTGCCTCAAACTACTTCCCTTGGTATAAGCAAGAACTTGGAAAAAGACCTCAG | |
| | CTTATTATAGACATTCGTTCAAATGTGGGCGAAAAGAAAGACCAACGAATTGCTGTTACATTG | |
| | AACAAGACAGCCAAACATTTCTCCCTGCACATCACAGAGACCCAACCTGAAGACTCGGCTGTC | |
| | TACTTCTGTGCAGCAAGTAACCCTACTGGAGCCAATAGTAAGCTGACATTTGGAAAAGGAATA | |
| | ACTCTGAGTGTTAGACCAGATATCCAGAAGCCTGACCCTGCCGTGTACCAGCTGAGAGACTCT | |
| | AAATCCAGTGACAAGTCTGTCTGCCTATTCACCGATTTTGATTCTCAAACAAATGTGTCACAA | |
| | AGTAAGGATTCTGATGTGTATATCACAGACAAAACTGTGCTAGACATGAGGTCTATGGACTTC | |
| | AAGAGCAACAGTGCTGTGGCCTGGAGCAACAAATCTGACTTTGCATGTGCAAACGCCTTCAAC | |
| | AACAGCATTATTCCAGAAGACACCTTCTTCCCCAGCCCAGAAAGTTCCTGTGATGTCAAGCTG | |
| | GTCGAGAAAAGCTTTGAAACAGATACGAACCTAAACTTTCAAAACCTGTCAGTGATTGGGTTC | |
| | CGAATCCTCCTCCTGAAAGTGGCCGGGTTTAATCTGCTCATGACGCTGCGGCTGTGGTCCAGC | |
| | GGCTCCGGAGCCACGAACTTCTCTCTGTTAAAGCAAGCAGGAGACGTGGAAGAAAACCCCGGT | |
| | CCCATGGGTACCAGCCTCCTCTGCTGGATGGCCCTGTGTCTCCTGGGGGCAGATCACGCAGAT | |
| | ACTGGAGTCTCCCAGGACCCCAGACACAAGATCACAAAGAGGGGACAGAATGTAACTTTCAGG | |
| | TGTGATCCAATTTCTGAACACAACCGCCTTTATTGGTACCGACAGACCCTGGGGCAGGGCCCA | |
| | GAGTTTCTGACTTACTTCCAGAATGAAGCTCAACTAGAAAAATCAAGGCTGCTCAGTGATCGG | |
| | TTCTCTGCAGAGAGGCCTAAGGGATCTTTCTCCACCTTGGAGATCCAGCGCACAGAGCAGGGG | |
| | GACTCGGCCATGTATCTCTGTGCCAGCAGCTTAGTCCGAAATGAAAAACTGTTTTTTGGCAGT | |
| | GGAACCCAGCTCTCTGTCTTGGAGGACCTGAACAAGGTGTTCCCACCCGAGGTCGCTGTGTTT | |
| | GAGCCATCAGAAGCAGAGATCTCCCACACCCAAAAGGCCACACTGGTGTGCCTGGCCACAGGC | |
| | TTCTTCCCCGACCACGTGGAGCTGAGCTGGTGGGTGAATGGGAAGGAGGTGCACAGTGGGGTC | |
| | AGCACAGACCCGCAGCCCCTCAAGGAGCAGCCCGCCCTCAATGACTCCAGATACTGCCTGAGC | |
| | AGCCGCCTGAGGGTCTCGGCCACCTTCTGGCAGAACCCCCGCAACCACTTCCGCTGTCAAGTC | |
| | CAGTTCTACGGGCTCTCGGAGAATGACGAGTGGACCCAGGATAGGGCCAAACCCGTCACCCAG | |
| | ATCGTCAGCGCCGAGGCCTGGGGTAGAGCAGACTGTGGCTTTACCTCGGTGTCCTACCAGCAA | |
| | GGGGTCCTGTCTGCCACCATCCTCTATGAGATCCTGCTAGGGAAGGCCACCCTGTATGCTGTG | |
| | CTGGTCAGCGCCCTTGTGTTGATGGCCATGGTCAAGAGAAAGGATTTCTGA | |
| 251 | MSIRAVFIFLWLQLDLVNGENVEQHPSTLSVQEGDSAVIKCTYSDSASNYFPWYKQELGKRPQ | TCR Q full |
| | LIIDIRSNVGEKKDQRIAVTLNKTAKHFSLHITETQPEDSAVYFCAASNPTGANSKLTFGKGI | construct aa |
| | TLSVRPDIQKPDPAVYQLRDSKSSDKSVCLFTDFDSQTNVSQSKDSDVYITDKTVLDMRSMDF | |
| | KSNSAVAWSNKSDFACANAFNNSIIPEDTFFPSPESSCDVKLVEKSFETDTNLNFQNLSVIGF | |
| | RILLLKVAGFNLLMTLRLWSSGSGATNFSLLKQAGDVEENPGPMGTSLLCWMALCLLGADHAD | |
| | TGVSQDPRHKITKRGQNVTFRCDPISEHNRLYWYRQTLGQGPEFLTYFQNEAQLEKSRLLSDR | |
| | FSAERPKGSFSTLEIQRTEQGDSAMYLCASSLVRNEKLFFGSGTQLSVLEDLNKVFPPEVAVF | |
| | EPSEAEISHTQKATLVCLATGFFPDHVELSWWVNGKEVHSGVSTDPQPLKEQPALNDSRYCLS | |
| | SRLRVSATFWQNPRNHFRCQVQFYGLSENDEWTQDRAKPVTQIVSAEAWGRADCGFTSVSYQQ | |
| | GVLSATILYEILLGKATLYAVLVSALVLMAMVKRKDF | |
| 252 | ATEMNSNYQLI | TCR R Vα |
| | | CDR-3 |
| 253 | SQQGEEDPQALSIQEGENATMNCSYKTSINNLQWYRQNSGRGLVHLILIRSNEREKHSGRLRV | TCR R Vα |
| | TLDTSKKSSSLLITASRAADTASYFCATEMNSNYQLIWGAGTKLIIKPD | (aa) |
| 254 | METLLGVSLVILWLQLARVNSQQGEEDPQALSIQEGENATMNCSYKTSINNLQWYRQNSGRGL | TCR R Vα + |
| | VHLILIRSNEREKHSGRLRVTLDTSKKSSSLLITASRAADTASYFCATEMNSNYQLIWGAGTK | ss (aa) |
| | LIIKPD | |
| 255 | METLLGVSLVILWLQLARVNSQQGEEDPQALSIQEGENATMNCSYKTSINNLQWYRQNSGRGL | TCR R Vα + |
| | VHLILIRSNEREKHSGRLRVTLDTSKKSSSLLITASRAADTASYFCATEMNSNYQLIWGAGTK | Cα (aa) |
| | LIIKPDIQNPDPAVYQLRDSKSSDKSVCLFTDFDSQTNVSQSKDSDVYITDKTVLDMRSMDFK | |
| | SNSAVAWSNKSDFACANAFNNSIIPEDTFFPSPESSCDVKLVEKSFETDTNLNFQNLSVIGFR | |
| | ILLLKVAGFNLLMTLRLWSS | |
| 256 | ATGGAAACTCTCCTGGGAGTGTCTTTGGTGATTCTATGGCTTCAACTGGCTAGGGTGAACAGT | TCR R Vα |
| | CAACAGGGAGAAGAGGATCCTCAGGCCTTGAGCATCCAGGAGGGTGAAAATGCCACCATGAAC | (nt) |
| | TGCAGTTACAAAACTAGTATAAACAATTTACAGTGGTATAGACAAAATTCAGGTAGAGGCCTT | |
| | GTCCACCTAATTTTAATACGTTCAAATGAAAGAGAGAAACACAGTGGAAGATTAAGAGTCACG | |
| | CTTGACACTTCCAAGAAAAGCAGTTCCTTGTTGATCACGGCTTCCCGGGCAGCAGACACTGCT | |
| | TCTTACTTCTGTGCTACGGAAATGAATAGCAACTATCAGTTAATCTGGGGCGCTGGGACCAAG | |
| | CTAATTATAAAGCCAGAT | |
| 257 | ATGGAAACTCTCCTGGGAGTGTCTTTGGTGATTCTATGGCTTCAACTGGCTAGGGTGAACAGT | TCR R Vα + |
| | CAACAGGGAGAAGAGGATCCTCAGGCCTTGAGCATCCAGGAGGGTGAAAATGCCACCATGAAC | Cα (nt) |
| | TGCAGTTACAAAACTAGTATAAACAATTTACAGTGGTATAGACAAAATTCAGGTAGAGGCCTT | |
| | GTCCACCTAATTTTAATACGTTCAAATGAAAGAGAGAAACACAGTGGAAGATTAAGAGTCACG | |
| | CTTGACACTTCCAAGAAAAGCAGTTCCTTGTTGATCACGGCTTCCCGGGCAGCAGACACTGCT | |
| | TCTTACTTCTGTGCTACGGAAATGAATAGCAACTATCAGTTAATCTGGGGCGCTGGGACCAAG | |
| | CTAATTATAAAGCCAGATATCCAGAACCCTGACCCTGCCGTGTACCAGCTGAGAGACTCTAAA | |
| | TCCAGTGACAAGTCTGTCTGCCTATTCACCGATTTTGATTCTCAAACAAATGTGTCACAAAGT | |
| | AAGGATTCTGATGTGTATATCACAGACAAAACTGTGCTAGACATGAGGTCTATGGACTTCAAG | |
| | AGCAACAGTGCTGTGGCCTGGAGCAACAAATCTGACTTTGCATGTGCAAACGCCTTCAACAAC | |
| | AGCATTATTCCAGAAGACACCTTCTTCCCCAGCCCAGAAAGTTCCTGTGATGTCAAGCTGGTC | |
| | GAGAAAAGCTTTGAAACAGATACGAACCTAAACTTTCAAAACCTGTCAGTGATTGGGTTCCGA | |
| | ATCCTCCTCCTGAAAGTGGCCGGGTTTAATCTGCTCATGACGCTGCGGCTGTGGTCCAGC | |
| 258 | ASSPLKGSNYGYT | TCR R Vβ |
| | | CDR-3 |
| 259 | DTGVSQDPRHKITKRGQNVTFRCDPISEHNRLYWYRQTLGQGPEFLTYFQNEAQLEKSRLLSD | TCR R Vβ |
| | RFSAERPKGSFSTLEIQRTEQGDSAMYLCASSPLKGSNYGYTFGSGTRLTVVE | (aa) |
| 260 | MGTSLLCWMALCLLGADHADTGVSQDPRHKITKRGQNVTFRCDPISEHNRLYWYRQTLGQGPE | TCR R Vβ + |
| | FLTYFQNEAQLEKSRLLSDRFSAERPKGSESTLEIQRTEQGDSAMYLCASSPLKGSNYGYTFG | ss (aa) |
| | SGTRLTVVE | |
| 261 | MGTSLLCWMALCLLGADHADTGVSQDPRHKITKRGQNVTFRCDPISEHNRLYWYRQTLGQGPE | TCR R Vβ + |
| | FLTYFQNEAQLEKSRLLSDRFSAERPKGSFSTLEIQRTEQGDSAMYLCASSPLKGSNYGYTFG | Cß (aa) |
| | SGTRLTVVEDLNKVFPPEVAVFEPSEAEISHTQKATLVCLATGFFPDHVELSWWVNGKEVHSG | |
| | VSTDPQPLKEQPALNDSRYCLSSRLRVSATFWQNPRNHFRCQVQFYGLSENDEWTQDRAKPVT | |
| | QIVSAEAWGRADCGFTSVSYQQGVLSATILYEILLGKATLYAVLVSALVLMAMVKRKDF | |
| 262 | ATGGGTACCAGCCTCCTCTGCTGGATGGCCCTGTGTCTCCTGGGGGCAGATCACGCAGATACT | TCR R Vβ |
| | GGAGTCTCCCAGGACCCCAGACACAAGATCACAAAGAGGGGACAGAATGTAACTTTCAGGTGT | (nt) |
| | GATCCAATTTCTGAACACAACCGCCTTTATTGGTACCGACAGACCCTGGGGCAGGGCCCAGAG | |
| | TTTCTGACTTACTTCCAGAATGAAGCTCAACTAGAAAAATCAAGGCTGCTCAGTGATCGGTTC | |
| | TCTGCAGAGAGGCCTAAGGGATCTTTCTCCACCTTGGAGATCCAGCGCACAGAGCAGGGGGAC | |
| | TCGGCCATGTATCTCTGTGCCAGCAGCCCCCTAAAGGGCTCCAACTATGGCTACACCTTCGGT | |
| | TCGGGGACCAGGTTAACCGTTGTAGAG | |
| 263 | ATGGGTACCAGCCTCCTCTGCTGGATGGCCCTGTGTCTCCTGGGGGCAGATCACGCAGATACT | TCR R Vβ + |
| | GGAGTCTCCCAGGACCCCAGACACAAGATCACAAAGAGGGGACAGAATGTAACTTTCAGGTGT | Cß (nt) |
| | GATCCAATTTCTGAACACAACCGCCTTTATTGGTACCGACAGACCCTGGGGCAGGGCCCAGAG | |
| | TTTCTGACTTACTTCCAGAATGAAGCTCAACTAGAAAAATCAAGGCTGCTCAGTGATCGGTTC | |
| | TCTGCAGAGAGGCCTAAGGGATCTTTCTCCACCTTGGAGATCCAGCGCACAGAGCAGGGGGAC | |
| | TCGGCCATGTATCTCTGTGCCAGCAGCCCCCTAAAGGGCTCCAACTATGGCTACACCTTCGGT | |
| | TCGGGGACCAGGTTAACCGTTGTAGAGGACCTGAACAAGGTGTTCCCACCCGAGGTCGCTGTG | |
| | TTTGAGCCATCAGAAGCAGAGATCTCCCACACCCAAAAGGCCACACTGGTGTGCCTGGCCACA | |
| | GGCTTCTTCCCCGACCACGTGGAGCTGAGCTGGTGGGTGAATGGGAAGGAGGTGCACAGTGGG | |
| | GTCAGCACAGACCCGCAGCCCCTCAAGGAGCAGCCCGCCCTCAATGACTCCAGATACTGCCTG | |
| | AGCAGCCGCCTGAGGGTCTCGGCCACCTTCTGGCAGAACCCCCGCAACCACTTCCGCTGTCAA | |
| | GTCCAGTTCTACGGGCTCTCGGAGAATGACGAGTGGACCCAGGATAGGGCCAAACCCGTCACC | |
| | CAGATCGTCAGCGCCGAGGCCTGGGGTAGAGCAGACTGTGGCTTTACCTCGGTGTCCTACCAG | |
| | CAAGGGGTCCTGTCTGCCACCATCCTCTATGAGATCCTGCTAGGGAAGGCCACCCTGTATGCT | |
| | GTGCTGGTCAGCGCCCTTGTGTTGATGGCCATGGTCAAGAGAAAGGATTTCTGA | |
| 264 | ATGGAAACTCTCCTGGGAGTGTCTTTGGTGATTCTATGGCTTCAACTGGCTAGGGTGAACAGT | TCR R full |
| | CAACAGGGAGAAGAGGATCCTCAGGCCTTGAGCATCCAGGAGGGTGAAAATGCCACCATGAAC | construct nt |
| | TGCAGTTACAAAACTAGTATAAACAATTTACAGTGGTATAGACAAAATTCAGGTAGAGGCCTT | |
| | GTCCACCTAATTTTAATACGTTCAAATGAAAGAGAGAAACACAGTGGAAGATTAAGAGTCACG | |
| | CTTGACACTTCCAAGAAAAGCAGTTCCTTGTTGATCACGGCTTCCCGGGCAGCAGACACTGCT | |
| | TCTTACTTCTGTGCTACGGAAATGAATAGCAACTATCAGTTAATCTGGGGCGCTGGGACCAAG | |
| | CTAATTATAAAGCCAGATATCCAGAACCCTGACCCTGCCGTGTACCAGCTGAGAGACTCTAAA | |
| | TCCAGTGACAAGTCTGTCTGCCTATTCACCGATTTTGATTCTCAAACAAATGTGTCACAAAGT | |
| | AAGGATTCTGATGTGTATATCACAGACAAAACTGTGCTAGACATGAGGTCTATGGACTTCAAG | |
| | AGCAACAGTGCTGTGGCCTGGAGCAACAAATCTGACTTTGCATGTGCAAACGCCTTCAACAAC | |
| | AGCATTATTCCAGAAGACACCTTCTTCCCCAGCCCAGAAAGTTCCTGTGATGTCAAGCTGGTC | |
| | GAGAAAAGCTTTGAAACAGATACGAACCTAAACTTTCAAAACCTGTCAGTGATTGGGTTCCGA | |
| | ATCCTCCTCCTGAAAGTGGCCGGGTTTAATCTGCTCATGACGCTGCGGCTGTGGTCCAGCGGC | |
| | TCCGGAGCCACGAACTTCTCTCTGTTAAAGCAAGCAGGAGACGTGGAAGAAAACCCCGGTCCC | |
| | ATGGGTACCAGCCTCCTCTGCTGGATGGCCCTGTGTCTCCTGGGGGCAGATCACGCAGATACT | |
| | GGAGTCTCCCAGGACCCCAGACACAAGATCACAAAGAGGGGACAGAATGTAACTTTCAGGTGT | |
| | GATCCAATTTCTGAACACAACCGCCTTTATTGGTACCGACAGACCCTGGGGCAGGGCCCAGAG | |
| | TTTCTGACTTACTTCCAGAATGAAGCTCAACTAGAAAAATCAAGGCTGCTCAGTGATCGGTTC | |
| | TCTGCAGAGAGGCCTAAGGGATCTTTCTCCACCTTGGAGATCCAGCGCACAGAGCAGGGGGAC | |
| | TCGGCCATGTATCTCTGTGCCAGCAGCCCCCTAAAGGGCTCCAACTATGGCTACACCTTCGGT | |
| | TCGGGGACCAGGTTAACCGTTGTAGAGGACCTGAACAAGGTGTTCCCACCCGAGGTCGCTGTG | |
| | TTTGAGCCATCAGAAGCAGAGATCTCCCACACCCAAAAGGCCACACTGGTGTGCCTGGCCACA | |
| | GGCTTCTTCCCCGACCACGTGGAGCTGAGCTGGTGGGTGAATGGGAAGGAGGTGCACAGTGGG | |
| | GTCAGCACAGACCCGCAGCCCCTCAAGGAGCAGCCCGCCCTCAATGACTCCAGATACTGCCTG | |
| | AGCAGCCGCCTGAGGGTCTCGGCCACCTTCTGGCAGAACCCCCGCAACCACTTCCGCTGTCAA | |
| | GTCCAGTTCTACGGGCTCTCGGAGAATGACGAGTGGACCCAGGATAGGGCCAAACCCGTCACC | |
| | CAGATCGTCAGCGCCGAGGCCTGGGGTAGAGCAGACTGTGGCTTTACCTCGGTGTCCTACCAG | |
| | CAAGGGGTCCTGTCTGCCACCATCCTCTATGAGATCCTGCTAGGGAAGGCCACCCTGTATGCT | |
| | GTGCTGGTCAGCGCCCTTGTGTTGATGGCCATGGTCAAGAGAAAGGATTTCTGA | |
| 265 | METLLGVSLVILWLQLARVNSQQGEEDPQALSIQEGENATMNCSYKTSINNLQWYRQNSGRGL | TCR R full |
| | VHLILIRSNEREKHSGRLRVTLDTSKKSSSLLITASRAADTASYFCATEMNSNYQLIWGAGTK | construct aa |
| | LIIKPDIQNPDPAVYQLRDSKSSDKSVCLFTDFDSQTNVSQSKDSDVYITDKTVLDMRSMDFK | |
| | SNSAVAWSNKSDFACANAFNNSIIPEDTFFPSPESSCDVKLVEKSFETDTNLNFQNLSVIGER | |
| | ILLLKVAGFNLLMTLRLWSSGSGATNFSLLKQAGDVEENPGPMGTSLLCWMALCLLGADHADT | |
| | GVSQDPRHKITKRGQNVTFRCDPISEHNRLYWYRQTLGQGPEFLTYFQNEAQLEKSRLLSDRF | |
| | SAERPKGSFSTLEIQRTEQGDSAMYLCASSPLKGSNYGYTFGSGTRLTVVEDLNKVEPPEVAV | |
| | FEPSEAEISHTQKATLVCLATGFFPDHVELSWWVNGKEVHSGVSTDPQPLKEQPALNDSRYCL | |
| | SSRLRVSATFWQNPRNHFRCQVQFYGLSENDEWTQDRAKPVTQIVSAEAWGRADCGFTSVSYQ | |
| | QGVLSATILYEILLGKATLYAVLVSALVLMAMVKRKDF | |
| 266 | TISGNEY | TCR S Vα |
| | | CDR-1 |
| 267 | GLKNN | TCR S Vα |
| | | CDR-2 |
| 268 | IVRASTSGTYKYI | TCR S Vα |
| | | CDR-3 |
| 269 | DAKTTQPPSMDCAEGRAANLPCNHSTISGNEYVYWYRQIHSQGPQYIIHGLKNNETNEMASLI | TCR S Vα |
| | ITEDRKSSTLILPHATLRDTAVYYCIVRASTSGTYKYIFGTGTRLKVLAN | (aa) |
| 270 | MRLVARVTVFLTFGTIIDAKTTQPPSMDCAEGRAANLPCNHSTISGNEYVYWYRQIHSQGPQY | TCR S Vα + |
| | IIHGLKNNETNEMASLIITEDRKSSTLILPHATLRDTAVYYCIVRASTSGTYKYIFGTGTRLK | ss (aa) |
| | VLAN | |
| 271 | MRLVARVTVFLTFGTIIDAKTTQPPSMDCAEGRAANLPCNHSTISGNEYVYWYRQIHSQGPQY | TCR S Vα + |
| | IIHGLKNNETNEMASLIITEDRKSSTLILPHATLRDTAVYYCIVRASTSGTYKYIFGTGTRLK | Cα (aa) |
| | VLANIQKPDPAVYQLRDSKSSDKSVCLFTDFDSQTNVSQSKDSDVYITDKTVLDMRSMDFKSN | |
| | SAVAWSNKSDFACANAFNNSIIPEDTFFPSPESSCDVKLVEKSFETDTNLNFQNLSVIGFRIL | |
| | LLKVAGFNLLMTLRLWSS | |
| 272 | ATGAGGCTGGTGGCAAGAGTAACTGTGTTTCTGACCTTTGGAACTATAATTGATGCTAAGACC | TCR S Vα |
| | ACCCAGCCCCCCTCCATGGATTGCGCTGAAGGAAGAGCTGCAAACCTGCCTTGTAATCACTCT | (nt) |
| | ACCATCAGTGGAAATGAGTATGTGTATTGGTATCGACAGATTCACTCCCAGGGGCCACAGTAT | |
| | ATCATTCATGGTCTAAAAAACAATGAAACCAATGAAATGGCCTCTCTGATCATCACAGAAGAC | |
| | AGAAAGTCCAGCACCTTGATCCTGCCCCACGCTACGCTGAGAGACACTGCTGTGTACTATTGC | |
| | ATCGTCAGAGCGTCTACCTCAGGAACCTACAAATACATCTTTGGAACAGGCACCAGGCTGAAG | |
| | GTTTTAGCAAAT | |
| 273 | ATGAGGCTGGTGGCAAGAGTAACTGTGTTTCTGACCTTTGGAACTATAATTGATGCTAAGACC | TCR S Vα + |
| | ACCCAGCCCCCCTCCATGGATTGCGCTGAAGGAAGAGCTGCAAACCTGCCTTGTAATCACTCT | Cα (nt) |
| | ACCATCAGTGGAAATGAGTATGTGTATTGGTATCGACAGATTCACTCCCAGGGGCCACAGTAT | |
| | ATCATTCATGGTCTAAAAAACAATGAAACCAATGAAATGGCCTCTCTGATCATCACAGAAGAC | |
| | AGAAAGTCCAGCACCTTGATCCTGCCCCACGCTACGCTGAGAGACACTGCTGTGTACTATTGC | |
| | ATCGTCAGAGCGTCTACCTCAGGAACCTACAAATACATCTTTGGAACAGGCACCAGGCTGAAG | |
| | GTTTTAGCAAATATCCAGAAGCCTGACCCTGCCGTGTACCAGCTGAGAGACTCTAAATCCAGT | |
| | GACAAGTCTGTCTGCCTATTCACCGATTTTGATTCTCAAACAAATGTGTCACAAAGTAAGGAT | |
| | TCTGATGTGTATATCACAGACAAAACTGTGCTAGACATGAGGTCTATGGACTTCAAGAGCAAC | |
| | AGTGCTGTGGCCTGGAGCAACAAATCTGACTTTGCATGTGCAAACGCCTTCAACAACAGCATT | |
| | ATTCCAGAAGACACCTTCTTCCCCAGCCCAGAAAGTTCCTGTGATGTCAAGCTGGTCGAGAAA | |
| | AGCTTTGAAACAGATACGAACCTAAACTTTCAAAACCTGTCAGTGATTGGGTTCCGAATCCTC | |
| | CTCCTGAAAGTGGCCGGGTTTAATCTGCTCATGACGCTGCGGCTGTGGTCCAGC | |
| 274 | ATGGGTACCAGCCTCCTCTGCTGGATGGCCCTGTGTCTCCTGGGGGCAGATCACGCAGATACT | TCR S Vβ |
| | GGAGTCTCCCAGGACCCCAGACACAAGATCACAAAGAGGGGACAGAATGTAACTTTCAGGTGT | (nt) |
| | GATCCAATTTCTGAACACAACCGCCTTTATTGGTACCGACAGACCCTGGGGCAGGGCCCAGAG | |
| | TTTCTGACTTACTTCCAGAATGAAGCTCAACTAGAAAAATCAAGGCTGCTCAGTGATCGGTTC | |
| | TCTGCAGAGAGGCCTAAGGGATCTTTCTCCACCTTGGAGATCCAGCGCACAGAGCAGGGGGAC | |
| | TCGGCCATGTATCTCTGTGCCAGCAGTCCCGGGACAGTCTACAATGAGCAGTTCTTCGGGCCA | |
| | GGGACACGGCTCACCGTGCTAGAG | |
| 275 | ATGGGTACCAGCCTCCTCTGCTGGATGGCCCTGTGTCTCCTGGGGGCAGATCACGCAGATACT | TCR S Vβ + |
| | GGAGTCTCCCAGGACCCCAGACACAAGATCACAAAGAGGGGACAGAATGTAACTTTCAGGTGT | Cß (nt) |
| | GATCCAATTTCTGAACACAACCGCCTTTATTGGTACCGACAGACCCTGGGGCAGGGCCCAGAG | |
| | TTTCTGACTTACTTCCAGAATGAAGCTCAACTAGAAAAATCAAGGCTGCTCAGTGATCGGTTC | |
| | TCTGCAGAGAGGCCTAAGGGATCTTTCTCCACCTTGGAGATCCAGCGCACAGAGCAGGGGGAC | |
| | TCGGCCATGTATCTCTGTGCCAGCAGTCCCGGGACAGTCTACAATGAGCAGTTCTTCGGGCCA | |
| | GGGACACGGCTCACCGTGCTAGAGGACCTGAAAAACGTGTTCCCACCCGAGGTCGCTGTGTTT | |
| | GAGCCATCAGAAGCAGAGATCTCCCACACCCAAAAGGCCACACTGGTATGCCTGGCCACAGGC | |
| | TTCTACCCCGACCACGTGGAGCTGAGCTGGTGGGTGAATGGGAAGGAGGTGCACAGTGGGGTC | |
| | AGCACAGACCCGCAGCCCCTCAAGGAGCAGCCCGCCCTCAATGACTCCAGATACTGCCTGAGC | |
| | AGCCGCCTGAGGGTCTCGGCCACCTTCTGGCAGAACCCCCGCAACCACTTCCGCTGTCAAGTC | |
| | CAGTTCTACGGGCTCTCGGAGAATGACGAGTGGACCCAGGATAGGGCCAAACCTGTCACCCAG | |
| | ATCGTCAGCGCCGAGGCCTGGGGTAGAGCAGACTGTGGCTTCACCTCCGAGTCTTACCAGCAA | |
| | GGGGTCCTGTCTGCCACCATCCTCTATGAGATCTTGCTAGGGAAGGCCACCTTGTATGCCGTG | |
| | CTGGTCAGTGCCCTCGTGCTGATGGCCATGGTCAAGAGAAAGGATTCCAGAGGCTAG | |
| 276 | ATGAGGCTGGTGGCAAGAGTAACTGTGTTTCTGACCTTTGGAACTATAATTGATGCTAAGACC | TCR S full |
| | ACCCAGCCCCCCTCCATGGATTGCGCTGAAGGAAGAGCTGCAAACCTGCCTTGTAATCACTCT | construct nt |
| | ACCATCAGTGGAAATGAGTATGTGTATTGGTATCGACAGATTCACTCCCAGGGGCCACAGTAT | |
| | ATCATTCATGGTCTAAAAAACAATGAAACCAATGAAATGGCCTCTCTGATCATCACAGAAGAC | |
| | AGAAAGTCCAGCACCTTGATCCTGCCCCACGCTACGCTGAGAGACACTGCTGTGTACTATTGC | |
| | ATCGTCAGAGCGTCTACCTCAGGAACCTACAAATACATCTTTGGAACAGGCACCAGGCTGAAG | |
| | GTTTTAGCAAATATCCAGAAGCCTGACCCTGCCGTGTACCAGCTGAGAGACTCTAAATCCAGT | |
| | GACAAGTCTGTCTGCCTATTCACCGATTTTGATTCTCAAACAAATGTGTCACAAAGTAAGGAT | |
| | TCTGATGTGTATATCACAGACAAAACTGTGCTAGACATGAGGTCTATGGACTTCAAGAGCAAC | |
| | AGTGCTGTGGCCTGGAGCAACAAATCTGACTTTGCATGTGCAAACGCCTTCAACAACAGCATT | |
| | ATTCCAGAAGACACCTTCTTCCCCAGCCCAGAAAGTTCCTGTGATGTCAAGCTGGTCGAGAAA | |
| | AGCTTTGAAACAGATACGAACCTAAACTTTCAAAACCTGTCAGTGATTGGGTTCCGAATCCTC | |
| | CTCCTGAAAGTGGCCGGGTTTAATCTGCTCATGACGCTGCGGCTGTGGTCCAGCGGCTCCGGA | |
| | GCCACGAACTTCTCTCTGTTAAAGCAAGCAGGAGACGTGGAAGAAAACCCCGGTCCCATGGGT | |
| | ACCAGCCTCCTCTGCTGGATGGCCCTGTGTCTCCTGGGGGCAGATCACGCAGATACTGGAGTC | |
| | TCCCAGGACCCCAGACACAAGATCACAAAGAGGGGACAGAATGTAACTTTCAGGTGTGATCCA | |
| | ATTTCTGAACACAACCGCCTTTATTGGTACCGACAGACCCTGGGGCAGGGCCCAGAGTTTCTG | |
| | ACTTACTTCCAGAATGAAGCTCAACTAGAAAAATCAAGGCTGCTCAGTGATCGGTTCTCTGCA | |
| | GAGAGGCCTAAGGGATCTTTCTCCACCTTGGAGATCCAGCGCACAGAGCAGGGGGACTCGGCC | |
| | ATGTATCTCTGTGCCAGCAGTCCCGGGACAGTCTACAATGAGCAGTTCTTCGGGCCAGGGACA | |
| | CGGCTCACCGTGCTAGAGGACCTGAAAAACGTGTTCCCACCCGAGGTCGCTGTGTTTGAGCCA | |
| | TCAGAAGCAGAGATCTCCCACACCCAAAAGGCCACACTGGTATGCCTGGCCACAGGCTTCTAC | |
| | CCCGACCACGTGGAGCTGAGCTGGTGGGTGAATGGGAAGGAGGTGCACAGTGGGGTCAGCACA | |
| | GACCCGCAGCCCCTCAAGGAGCAGCCCGCCCTCAATGACTCCAGATACTGCCTGAGCAGCCGC | |
| | CTGAGGGTCTCGGCCACCTTCTGGCAGAACCCCCGCAACCACTTCCGCTGTCAAGTCCAGTTC | |
| | TACGGGCTCTCGGAGAATGACGAGTGGACCCAGGATAGGGCCAAACCTGTCACCCAGATCGTC | |
| | AGCGCCGAGGCCTGGGGTAGAGCAGACTGTGGCTTCACCTCCGAGTCTTACCAGCAAGGGGTC | |
| | CTGTCTGCCACCATCCTCTATGAGATCTTGCTAGGGAAGGCCACCTTGTATGCCGTGCTGGTC | |
| | AGTGCCCTCGTGCTGATGGCCATGGTCAAGAGAAAGGATTCCAGAGGCTAG | |
| 277 | MRLVARVTVFLTFGTIIDAKTTQPPSMDCAEGRAANLPCNHSTISGNEYVYWYRQIHSQGPQY | TCR S full |
| | IIHGLKNNETNEMASLIITEDRKSSTLILPHATLRDTAVYYCIVRASTSGTYKYIFGTGTRLK | construct aa |
| | VLANIQKPDPAVYQLRDSKSSDKSVCLFTDFDSQTNVSQSKDSDVYITDKTVLDMRSMDFKSN | |
| | SAVAWSNKSDFACANAFNNSIIPEDTFFPSPESSCDVKLVEKSFETDTNLNFQNLSVIGFRIL | |
| | LLKVAGFNLLMTLRLWSSGSGATNFSLLKQAGDVEENPGPMGTSLLCWMALCLLGADHADTGV | |
| | SQDPRHKITKRGQNVTFRCDPISEHNRLYWYRQTLGQGPEFLTYFQNEAQLEKSRLLSDRESA | |
| | ERPKGSFSTLEIQRTEQGDSAMYLCASSPGTVYNEQFFGPGTRLTVLEDLKNVFPPEVAVFEP | |
| | SEAEISHTQKATLVCLATGFYPDHVELSWWVNGKEVHSGVSTDPQPLKEQPALNDSRYCLSSR | |
| 278 | ATPSGNTPLV | TCR T Vα |
| | | CDR-3 |
| 279 | SQQGEEDPQALSIQEGENATMNCSYKTSINNLQWYRQNSGRGLVHLILIRSNEREKHSGRLRV | TCR T Vα |
| | TLDTSKKSSSLLITASRAADTASYFCATPSGNTPLVFGKGTRLSVIAN | (aa) |
| 280 | METLLGVSLVILWLQLARVNSQQGEEDPQALSIQEGENATMNCSYKTSINNLQWYRQNSGRGL | TCR T Vα + |
| | VHLILIRSNEREKHSGRLRVTLDTSKKSSSLLITASRAADTASYFCATPSGNTPLVFGKGTRL | ss (aa) |
| | SVIAN | |
| 281 | METLLGVSLVILWLQLARVNSQQGEEDPQALSIQEGENATMNCSYKTSINNLQWYRQNSGRGL | TCR T Vα + |
| | VHLILIRSNEREKHSGRLRVTLDTSKKSSSLLITASRAADTASYFCATPSGNTPLVFGKGTRL | Cα (aa) |
| | SVIANIQNPDPAVYQLRDSKSSDKSVCLFTDFDSQTNVSQSKDSDVYITDKTVLDMRSMDFKS | |
| | NSAVAWSNKSDFACANAFNNSIIPEDTFFPSPESSCDVKLVEKSFETDTNLNFQNLSVIGFRI | |
| | LLLKVAGFNLLMTLRLWSS | |
| 282 | ATGGAAACTCTCCTGGGAGTGTCTTTGGTGATTCTATGGCTTCAACTGGCTAGGGTGAACAGT | TCR T Vα |
| | CAACAGGGAGAAGAGGATCCTCAGGCCTTGAGCATCCAGGAGGGTGAAAATGCCACCATGAAC | (nt) |
| | TGCAGTTACAAAACTAGTATAAACAATTTACAGTGGTATAGACAAAATTCAGGTAGAGGCCTT | |
| | GTCCACCTAATTTTAATACGTTCAAATGAAAGAGAGAAACACAGTGGAAGATTAAGAGTCACG | |
| | CTTGACACTTCCAAGAAAAGCAGTTCCTTGTTGATCACGGCTTCCCGGGCAGCAGACACTGCT | |
| | TCTTACTTCTGTGCTACCCCTTCAGGAAACACACCTCTTGTCTTTGGAAAGGGCACAAGACTT | |
| | TCTGTGATTGCAAAT | |
| 283 | ATGGAAACTCTCCTGGGAGTGTCTTTGGTGATTCTATGGCTTCAACTGGCTAGGGTGAACAGT | TCR T Vα + |
| | CAACAGGGAGAAGAGGATCCTCAGGCCTTGAGCATCCAGGAGGGTGAAAATGCCACCATGAAC | Cα (nt) |
| | TGCAGTTACAAAACTAGTATAAACAATTTACAGTGGTATAGACAAAATTCAGGTAGAGGCCTT | |
| | GTCCACCTAATTTTAATACGTTCAAATGAAAGAGAGAAACACAGTGGAAGATTAAGAGTCACG | |
| | CTTGACACTTCCAAGAAAAGCAGTTCCTTGTTGATCACGGCTTCCCGGGCAGCAGACACTGCT | |
| | TCTTACTTCTGTGCTACCCCTTCAGGAAACACACCTCTTGTCTTTGGAAAGGGCACAAGACTT | |
| | TCTGTGATTGCAAATATCCAGAACCCTGACCCTGCCGTGTACCAGCTGAGAGACTCTAAATCC | |
| | AGTGACAAGTCTGTCTGCCTATTCACCGATTTTGATTCTCAAACAAATGTGTCACAAAGTAAG | |
| | GATTCTGATGTGTATATCACAGACAAAACTGTGCTAGACATGAGGTCTATGGACTTCAAGAGC | |
| | AACAGTGCTGTGGCCTGGAGCAACAAATCTGACTTTGCATGTGCAAACGCCTTCAACAACAGC | |
| | ATTATTCCAGAAGACACCTTCTTCCCCAGCCCAGAAAGTTCCTGTGATGTCAAGCTGGTCGAG | |
| | AAAAGCTTTGAAACAGATACGAACCTAAACTTTCAAAACCTGTCAGTGATTGGGTTCCGAATC | |
| | CTCCTCCTGAAAGTGGCCGGGTTTAATCTGCTCATGACGCTGCGGCTGTGGTCCAGC | |
| 284 | ASSQLAGVIEQF | TCR T Vβ |
| | | CDR-3 |
| 285 | DTGVSQDPRHKITKRGQNVTFRCDPISEHNRLYWYRQTLGQGPELLTYFQNEAQLEKSRLLSD | TCR T Vβ |
| | RFSAERPKGSFSTLEIQRTEQGDSAMYLCASSQLAGVIEQFFGPGTRLTVLE | (aa) |
| 286 | MGTSLLCWMALCLLGADHADTGVSQDPRHKITKRGQNVTFRCDPISEHNRLYWYRQTLGQGPE | TCR T Vβ + |
| | LLTYFQNEAQLEKSRLLSDRFSAERPKGSESTLEIQRTEQGDSAMYLCASSQLAGVIEQFFGP | ss (aa) |
| | GTRLTVLE | |
| 287 | MGTSLLCWMALCLLGADHADTGVSQDPRHKITKRGQNVTFRCDPISEHNRLYWYRQTLGQGPE | TCR T Vβ + |
| | FLTYFQNEAQLEKSRLLSDRFSAERPKGSFSTLEIQRTEQGDSAMYLCASSQLAGVIEQFFGP | Cß (aa) |
| | GTRLTVLEDLKNVFPPEVAVFEPSEAEISHTQKATLVCLATGFYPDHVELSWWVNGKEVHSGV | |
| | STDPQPLKEQPALNDSRYCLSSRLRVSATFWQNPRNHFRCQVQFYGLSENDEWTQDRAKPVTQ | |
| | IVSAEAWGRADCGFTSESYQQGVLSATILYEILLGKATLYAVLVSALVLMAMVKRKDSRG | |
| 288 | ATGGGTACCAGCCTCCTCTGCTGGATGGCCCTGTGTCTCCTGGGGGCAGATCACGCAGATACT | TCR T Vβ |
| | GGAGTCTCCCAGGACCCCAGACACAAGATCACAAAGAGGGGACAGAATGTAACTTTCAGGTGT | (nt) |
| | GATCCAATTTCTGAACACAACCGCCTTTATTGGTACCGACAGACCCTGGGGCAGGGCCCAGAG | |
| | TTTCTGACTTACTTCCAGAATGAAGCTCAACTAGAAAAATCAAGGCTGCTCAGTGATCGGTTC | |
| | TCTGCAGAGAGGCCTAAGGGATCTTTCTCCACCTTGGAGATCCAGCGCACAGAGCAGGGGGAC | |
| | TCGGCCATGTATCTCTGTGCCAGCTCCCAACTAGCGGGAGTGATTGAGCAGTTCTTCGGGCCA | |
| | GGGACACGGCTCACCGTGCTAGAG | |
| 289 | ATGGGTACCAGCCTCCTCTGCTGGATGGCCCTGTGTCTCCTGGGGGCAGATCACGCAGATACT | TCR T Vβ + |
| | GGAGTCTCCCAGGACCCCAGACACAAGATCACAAAGAGGGGACAGAATGTAACTTTCAGGTGT | Cß (nt) |
| | GATCCAATTTCTGAACACAACCGCCTTTATTGGTACCGACAGACCCTGGGGCAGGGCCCAGAG | |
| | TTTCTGACTTACTTCCAGAATGAAGCTCAACTAGAAAAATCAAGGCTGCTCAGTGATCGGTTC | |
| | TCTGCAGAGAGGCCTAAGGGATCTTTCTCCACCTTGGAGATCCAGCGCACAGAGCAGGGGGAC | |
| | TCGGCCATGTATCTCTGTGCCAGCTCCCAACTAGCGGGAGTGATTGAGCAGTTCTTCGGGCCA | |
| | GGGACACGGCTCACCGTGCTAGAGGACCTGAAAAACGTGTTCCCACCCGAGGTCGCTGTGTTT | |
| | GAGCCATCAGAAGCAGAGATCTCCCACACCCAAAAGGCCACACTGGTATGCCTGGCCACAGGC | |
| | TTCTACCCCGACCACGTGGAGCTGAGCTGGTGGGTGAATGGGAAGGAGGTGCACAGTGGGGTC | |
| | AGCACAGACCCGCAGCCCCTCAAGGAGCAGCCCGCCCTCAATGACTCCAGATACTGCCTGAGC | |
| | AGCCGCCTGAGGGTCTCGGCCACCTTCTGGCAGAACCCCCGCAACCACTTCCGCTGTCAAGTC | |
| | CAGTTCTACGGGCTCTCGGAGAATGACGAGTGGACCCAGGATAGGGCCAAACCTGTCACCCAG | |
| | ATCGTCAGCGCCGAGGCCTGGGGTAGAGCAGACTGTGGCTTCACCTCCGAGTCTTACCAGCAA | |
| | GGGGTCCTGTCTGCCACCATCCTCTATGAGATCTTGCTAGGGAAGGCCACCTTGTATGCCGTG | |
| | CTGGTCAGTGCCCTCGTGCTGATGGCCATGGTCAAGAGAAAGGATTCCAGAGGCTAG | |
| 290 | ATGGAAACTCTCCTGGGAGTGTCTTTGGTGATTCTATGGCTTCAACTGGCTAGGGTGAACAGT | TCR T full |
| | CAACAGGGAGAAGAGGATCCTCAGGCCTTGAGCATCCAGGAGGGTGAAAATGCCACCATGAAC | construct nt |
| | TGCAGTTACAAAACTAGTATAAACAATTTACAGTGGTATAGACAAAATTCAGGTAGAGGCCTT | |
| | GTCCACCTAATTTTAATACGTTCAAATGAAAGAGAGAAACACAGTGGAAGATTAAGAGTCACG | |
| | CTTGACACTTCCAAGAAAAGCAGTTCCTTGTTGATCACGGCTTCCCGGGCAGCAGACACTGCT | |
| | TCTTACTTCTGTGCTACCCCTTCAGGAAACACACCTCTTGTCTTTGGAAAGGGCACAAGACTT | |
| | TCTGTGATTGCAAATATCCAGAACCCTGACCCTGCCGTGTACCAGCTGAGAGACTCTAAATCC | |
| | AGTGACAAGTCTGTCTGCCTATTCACCGATTTTGATTCTCAAACAAATGTGTCACAAAGTAAG | |
| | GATTCTGATGTGTATATCACAGACAAAACTGTGCTAGACATGAGGTCTATGGACTTCAAGAGC | |
| | AACAGTGCTGTGGCCTGGAGCAACAAATCTGACTTTGCATGTGCAAACGCCTTCAACAACAGC | |
| | ATTATTCCAGAAGACACCTTCTTCCCCAGCCCAGAAAGTTCCTGTGATGTCAAGCTGGTCGAG | |
| | AAAAGCTTTGAAACAGATACGAACCTAAACTTTCAAAACCTGTCAGTGATTGGGTTCCGAATC | |
| | CTCCTCCTGAAAGTGGCCGGGTTTAATCTGCTCATGACGCTGCGGCTGTGGTCCAGCGGCTCC | |
| | GGAGCCACGAACTTCTCTCTGTTAAAGCAAGCAGGAGACGTGGAAGAAAACCCCGGTCCCATG | |
| | GGTACCAGCCTCCTCTGCTGGATGGCCCTGTGTCTCCTGGGGGCAGATCACGCAGATACTGGA | |
| | GTCTCCCAGGACCCCAGACACAAGATCACAAAGAGGGGACAGAATGTAACTTTCAGGTGTGAT | |
| | CCAATTTCTGAACACAACCGCCTTTATTGGTACCGACAGACCCTGGGGCAGGGCCCAGAGTTT | |
| | CTGACTTACTTCCAGAATGAAGCTCAACTAGAAAAATCAAGGCTGCTCAGTGATCGGTTCTCT | |
| | GCAGAGAGGCCTAAGGGATCTTTCTCCACCTTGGAGATCCAGCGCACAGAGCAGGGGGACTCG | |
| | GCCATGTATCTCTGTGCCAGCTCCCAACTAGCGGGAGTGATTGAGCAGTTCTTCGGGCCAGGG | |
| | ACACGGCTCACCGTGCTAGAGGACCTGAAAAACGTGTTCCCACCCGAGGTCGCTGTGTTTGAG | |
| | CCATCAGAAGCAGAGATCTCCCACACCCAAAAGGCCACACTGGTATGCCTGGCCACAGGCTTC | |
| | TACCCCGACCACGTGGAGCTGAGCTGGTGGGTGAATGGGAAGGAGGTGCACAGTGGGGTCAGC | |
| | ACAGACCCGCAGCCCCTCAAGGAGCAGCCCGCCCTCAATGACTCCAGATACTGCCTGAGCAGC | |
| | CGCCTGAGGGTCTCGGCCACCTTCTGGCAGAACCCCCGCAACCACTTCCGCTGTCAAGTCCAG | |
| | TTCTACGGGCTCTCGGAGAATGACGAGTGGACCCAGGATAGGGCCAAACCTGTCACCCAGATC | |
| | GTCAGCGCCGAGGCCTGGGGTAGAGCAGACTGTGGCTTCACCTCCGAGTCTTACCAGCAAGGG | |
| | GTCCTGTCTGCCACCATCCTCTATGAGATCTTGCTAGGGAAGGCCACCTTGTATGCCGTGCTG | |
| | GTCAGTGCCCTCGTGCTGATGGCCATGGTCAAGAGAAAGGATTCCAGAGGCTAG | |
| 291 | METLLGVSLVILWLQLARVNSQQGEEDPQALSIQEGENATMNCSYKTSINNLQWYRQNSGRGL | TCR T full |
| | VHLILIRSNEREKHSGRLRVTLDTSKKSSSLLITASRAADTASYFCATPSGNTPLVFGKGTRL | construct aa |
| | SVIANIQNPDPAVYQLRDSKSSDKSVCLFTDFDSQTNVSQSKDSDVYITDKTVLDMRSMDFKS | |
| | NSAVAWSNKSDFACANAFNNSIIPEDTFFPSPESSCDVKLVEKSFETDTNLNFQNLSVIGFRI | |
| | LLLKVAGFNLLMTLRLWSSGSGATNFSLLKQAGDVEENPGPMGTSLLCWMALCLLGADHADTG | |
| | VSQDPRHKITKRGQNVTFRCDPISEHNRLYWYRQTLGQGPEFLTYFQNEAQLEKSRLLSDRES | |
| | AERPKGSFSTLEIQRTEQGDSAMYLCASSQLAGVIEQFFGPGTRLTVLEDLKNVFPPEVAVFE | |
| | PSEAEISHTQKATLVCLATGFYPDHVELSWWVNGKEVHSGVSTDPQPLKEQPALNDSRYCLSS | |
| | RLRVSATFWQNPRNHFRCQVQFYGLSENDEWTQDRAKPVTQIVSAEAWGRADCGFTSESYQQG | |
| | VLSATILYEILLGKATLYAVLVSALVLMAMVKRKDSRG | |
| 292 | GGCTCCGGA | Linker (nt) |
| 293 | ATATCCAGAACCCTGACCCTGCCGTGTACCAGCTGAGAGACTCTAAATCCAGTGACAAGTCTG | TRAC allele |
| | TCTGCCTATTCACCGATTTTGATTCTCAAACAAATGTGTCACAAAGTAAGGATTCTGATGTGT | 1 (nt) |
| | ATATCACAGACAAAACTGTGCTAGACATGAGGTCTATGGACTTCAAGAGCAACAGTGCTGTGG | |
| | CCTGGAGCAACAAATCTGACTTTGCATGTGCAAACGCCTTCAACAACAGCATTATTCCAGAAG | |
| | ACACCTTCTTCCCCAGCCCAGAAAGTTCCTGTGATGTCAAGCTGGTCGAGAAAAGCTTTGAAA | |
| | CAGATACGAACCTAAACTTTCAAAACCTGTCAGTGATTGGGTTCCGAATCCTCCTCCTGAAAG | |
| | TGGCCGGGTTTAATCTGCTCATGACGCTGCGGCTGTGGTCCAGC | |
| 294 | IQNPDPAVYQLRDSKSSDKSVCLFTDFDSQTNVSQSKDSDVYITDKTVLDMRSMDFKSNSAVA | TRAC allele |
| | WSNKSDFACANAFNNSIIPEDTFFPSPESSCDVKLVEKSFETDTNLNFQNLSVIGFRILLLKV | 1 (aa) |
| | AGFNLLMTLRLWSS | |
| 295 | ATCCAGAAGCCTGACCCTGCCGTGTACCAGCTGAGAGACTCTAAATCCAGTGACAAGTCTGTC | TRAC allele |
| | TGCCTATTCACCGATTTTGATTCTCAAACAAATGTGTCACAAAGTAAGGATTCTGATGTGTAT | 2 (nt) |
| | ATCACAGACAAAACTGTGCTAGACATGAGGTCTATGGACTTCAAGAGCAACAGTGCTGTGGCC | |
| | TGGAGCAACAAATCTGACTTTGCATGTGCAAACGCCTTCAACAACAGCATTATTCCAGAAGAC | |
| | ACCTTCTTCCCCAGCCCAGAAAGTTCCTGTGATGTCAAGCTGGTCGAGAAAAGCTTTGAAACA | |
| | GATACGAACCTAAACTTTCAAAACCTGTCAGTGATTGGGTTCCGAATCCTCCTCCTGAAAGTG | |
| | GCCGGGTTTAATCTGCTCATGACGCTGCGGCTGTGGTCCAGC | |
| 296 | IQKPDPAVYQLRDSKSSDKSVCLFTDFDSQTNVSQSKDSDVYITDKTVLDMRSMDFKSNSAVA | TRAC allele |
| | WSNKSDFACANAFNNSIIPEDTFFPSPESSCDVKLVEKSFETDTNLNFQNLSVIGFRILLLKV | 2 (aa) |
| | AGFNLLMTLRLWSS | |
| 297 | GACCTGAACAAGGTGTTCCCACCCGAGGTCGCTGTGTTTGAGCCATCAGAAGCAGAGATCTCC | TRBC1 (nt) |
| | CACACCCAAAAGGCCACACTGGTGTGCCTGGCCACAGGCTTCTTCCCCGACCACGTGGAGCTG | |
| | AGCTGGTGGGTGAATGGGAAGGAGGTGCACAGTGGGGTCAGCACAGACCCGCAGCCCCTCAAG | |
| | GAGCAGCCCGCCCTCAATGACTCCAGATACTGCCTGAGCAGCCGCCTGAGGGTCTCGGCCACC | |
| | TTCTGGCAGAACCCCCGCAACCACTTCCGCTGTCAAGTCCAGTTCTACGGGCTCTCGGAGAAT | |
| | GACGAGTGGACCCAGGATAGGGCCAAACCCGTCACCCAGATCGTCAGCGCCGAGGCCTGGGGT | |
| | AGAGCAGACTGTGGCTTTACCTCGGTGTCCTACCAGCAAGGGGTCCTGTCTGCCACCATCCTC | |
| | TATGAGATCCTGCTAGGGAAGGCCACCCTGTATGCTGTGCTGGTCAGCGCCCTTGTGTTGATG | |
| | GCCATGGTCAAGAGAAAGGATTTCTGA | |
| 298 | DLNKVFPPEVAVFEPSEAEISHTQKATLVCLATGFFPDHVELSWWVNGKEVHSGVSTDPQPLK | TRBC1 (aa) |
| | EQPALNDSRYCLSSRLRVSATFWQNPRNHFRCQVQFYGLSENDEWTQDRAKPVTQIVSAEAWG | |
| | RADCGFTSVSYQQGVLSATILYEILLGKATLYAVLVSALVLMAMVKRKDF | |
| 299 | GACCTGAAAAACGTGTTCCCACCCGAGGTCGCTGTGTTTGAGCCATCAGAAGCAGAGATCTCC | TRBC2 (nt) |
| | CACACCCAAAAGGCCACACTGGTATGCCTGGCCACAGGCTTCTACCCCGACCACGTGGAGCTG | |
| | AGCTGGTGGGTGAATGGGAAGGAGGTGCACAGTGGGGTCAGCACAGACCCGCAGCCCCTCAAG | |
| | GAGCAGCCCGCCCTCAATGACTCCAGATACTGCCTGAGCAGCCGCCTGAGGGTCTCGGCCACC | |
| | TTCTGGCAGAACCCCCGCAACCACTTCCGCTGTCAAGTCCAGTTCTACGGGCTCTCGGAGAAT | |
| | GACGAGTGGACCCAGGATAGGGCCAAACCTGTCACCCAGATCGTCAGCGCCGAGGCCTGGGGT | |
| | AGAGCAGACTGTGGCTTCACCTCCGAGTCTTACCAGCAAGGGGTCCTGTCTGCCACCATCCTC | |
| | TATGAGATCTTGCTAGGGAAGGCCACCTTGTATGCCGTGCTGGTCAGTGCCCTCGTGCTGATG | |
| | GCCATGGTCAAGAGAAAGGATTCCAGAGGCTAG | |
| 300 | DLKNVFPPEVAVFEPSEAEISHTQKATLVCLATGFYPDHVELSWWVNGKEVHSGVSTDPQPLK | TRBC2 (aa) |
| | EQPALNDSRYCLSSRLRVSATFWQNPRNHERCQVQFYGLSENDEWTQDRAKPVTQIVSAEAWG | |
| | RADCGFTSESYQQGVLSATILYEILLGKATLYAVLVSALVLMAMVKRKDSRG | |
| 301 | ATGGCCTCTGCTCCCATCTCTATGCTTGCTATGCTTTTTACATTAAGCGGCCTGAGAGCCCAA | TCR A Vα |
| | TCTGTTGCCCAACCTGAAGATCAAGTTAATGTTGCCGAAGGCAATCCTCTGACAGTGAAATGC | (nt) codon |
| | ACCTATTCTGTGTCTGGCAACCCTTATCTTTTTTGGTATGTGCAATACCCCAACAGGGGCCTG | optimized |
| | CAGTTTTTACTGAAATACATCACAGGCGATAACCTGGTGAAGGGCAGCTATGGCTTTGAAGCT | |
| | GAATTCAACAAGAGCCAGACAAGCTTCCACCTGAAGAAACCTTCTGCCCTTGTTTCTGACTCT | |
| | GCTTTGTACTTTTGTGCTGTGAGAGGCGGATCTTACAAATACATCTTTGGAACAGGCACCAGG | |
| | CTGAAGGTTTTAGCTAATATTCAGAACCCTGATCCTGCCGTGTATCAGCTGAGAGACTCTAAA | |
| | AGCTCTGACAAGTCTGTGTGCCTGTTCACCGACTTCGACTCTCAGACAAATGTGTCTCAGTCT | |
| | AAGGACAGCGATGTGTACATCACCGACAAGACAGTGCTTGACATGAGGTCTATGGACTTCAAG | |
| | AGCAACTCTGCTGTGGCTTGGAGCAACAAATCTGACTTTGCTTGTGCTAACGCCTTCAACAAC | |
| | AGCATTATTCCTGAAGACACCTTTTTCCCCAGCCCTGAATCTAGCTGTGATGTGAAGCTTGTG | |
| | GAGAAAAGCTTTGAGACCGACACCAACCTTAACTTCCAGAACCTGTCTGTGATTGGATTCAGG | |
| | ATTCTGCTGCTTAAAGTGGCCGGCTTCAATCTTCTTATGACCCTTAGGCTGTGGAGCAGC | |
| 302 | ATGGAGACACTGCTGGGAGTGTCTTTGGTTATTCTTTGGCTTCAACTGGCTAGGGTTAATAGC | TCR B Vα |
| | CAACAGGGAGAAGAGGATCCTCAAGCTTTGTCTATTCAGGAGGGAGAAAACGCCACCATGAAC | (nt) codon |
| | TGCAGCTACAAGACCTCTATCAACAACCTTCAGTGGTACAGACAGAATTCTGGAAGAGGCCTT | optimized |
| | GTGCACCTGATCTTGATCAGGAGCAATGAAAGAGAGAAGCACAGCGGAAGACTTAGAGTGACC | |
| | CTTGACACCAGCAAAAAAAGCTCTAGCCTGCTGATTACAGCTTCTAGGGCTGCTGATACAGCT | |
| | TCTTATTTCTGTGCTACAGCTCCTGGATCTGGAACCTACAAATACATCTTTGGAACAGGCACC | |
| | AGGCTGAAGGTTTTAGCTAATATTCAGAATCCTGACCCTGCCGTGTACCAACTGAGAGATTCT | |
| | AAAAGCTCTGACAAGAGCGTGTGCCTGTTCACCGACTTCGACTCTCAAACAAATGTGTCTCAG | |
| | TCTAAGGACAGCGACGTGTACATCACCGACAAAACAGTGCTTGACATGAGGTCTATGGACTTC | |
| | AAGAGCAACTCTGCTGTTGCCTGGAGCAACAAGTCTGACTTTGCTTGTGCTAACGCTTTCAAC | |
| | AACAGCATCATCCCTGAAGACACATTCTTTCCCAGCCCTGAATCTAGCTGTGATGTGAAGCTG | |
| | GTGGAGAAAAGCTTTGAGACCGACACCAACCTTAACTTCCAGAACCTTTCTGTGATTGGATTC | |
| | AGGATCCTGCTGCTGAAAGTGGCTGGCTTTAATCTTTTGATGACACTGAGGCTGTGGAGCAGC | |
| 303 | ATGGAGACCCTTTTGGGCCTGCTTATCTTGTGGCTTCAATTACAGTGGGTGAGCTCTAAACAA | TCR C Vα |
| | GAAGTTACCCAAATTCCTGCTGCCCTGTCTGTTCCCGAAGGAGAAAATTTGGTTCTGAACTGT | (nt) codon |
| | AGCTTCACCGATTCTGCTATTTACAACCTGCAATGGTTTAGGCAGGACCCTGGCAAAGGACTG | optimized |
| | ACATCTCTTTTGTTGATCCAGTCTTCTCAGAGAGAGCAAACATCTGGAAGACTTAATGCCAGC | |
| | CTGGACAAGTCTTCTGGAAGGTCTACATTATACATTGCCGCTTCTCAACCTGGAGATTCTGCT | |
| | ACATATTTGTGTGCTGTTAGGCCTAGGACCTCTGGAACATATAAATACATCTTTGGCACAGGC | |
| | ACCAGGCTGAAGGTGTTAGCTAATATCCAAAATCCTGATCCTGCCGTGTACCAGCTGAGAGAC | |
| | TCTAAAAGCTCTGATAAGAGCGTTTGCCTGTTCACCGACTTCGACAGCCAGACAAATGTGTCT | |
| | CAATCTAAGGACAGCGATGTGTACATCACCGACAAGACAGTGCTTGACATGAGGTCTATGGAC | |
| | TTCAAGAGCAACTCTGCTGTTGCCTGGAGCAACAAGTCTGACTTTGCTTGTGCTAACGCTTTC | |
| | AACAACAGCATCATTCCTGAAGATACCTTCTTCCCCAGCCCTGAATCTAGCTGTGATGTGAAA | |
| | CTGGTGGAGAAAAGCTTTGAGACCGACACCAACCTGAACTTCCAAAACCTGTCTGTGATTGGC | |
| | TTCAGGATCCTGTTACTGAAAGTGGCTGGCTTCAATCTTTTAATGACCCTGAGGCTGTGGAGC | |
| | AGC | |
| 304 | ATGGCCTCTGCCCCTATTAGCATGCTTGCTATGCTTTTTACATTGTCTGGCCTGAGAGCCCAA | TCR D Vα |
| | TCTGTTGCTCAGCCTGAAGATCAAGTTAATGTTGCCGAAGGCAATCCTCTGACAGTGAAATGC | (nt) codon |
| | ACCTATTCTGTGTCTGGCAACCCCTATCTTTTTTGGTATGTTCAATACCCCAACAGGGGCCTG | optimized |
| | CAGTTCTTGCTGAAATACATTACAGGCGATAATCTGGTGAAGGGCAGCTATGGCTTTGAAGCT | |
| | GAATTTAACAAGAGCCAGACCAGCTTCCACCTTAAGAAACCTTCTGCCCTTGTTTCTGATTCT | |
| | GCTTTGTACTTCTGTGCTGTGAGAGCTCCTACCTCTGGAACCTACAAGTACATCTTTGGAACA | |
| | GGCACCAGACTGAAGGTGTTAGCTAATATTCAGAATCCTGACCCTGCCGTTTACCAGCTGAGA | |
| | GACTCTAAAAGCTCTGACAAAAGCGTGTGCCTTTTCACCGACTTCGACAGCCAGACAAATGTG | |
| | TCTCAATCTAAGGACAGCGATGTGTACATCACCGACAAGACAGTGCTTGACATGAGGTCTATG | |
| | GATTTCAAGAGCAACTCTGCTGTGGCCTGGAGCAATAAATCTGACTTTGCTTGTGCTAACGCC | |
| | TTCAACAATAGCATTATTCCTGAAGACACCTTCTTCCCCAGCCCTGAATCTAGCTGTGATGTT | |
| | AAACTGGTGGAGAAGAGCTTTGAGACCGACACCAACCTGAACTTCCAGAACTTGTCTGTGATT | |
| | GGCTTTAGGATCTTGCTGCTGAAAGTTGCTGGCTTTAATCTTCTGATGACCCTGAGGCTGTGG | |
| | AGCAGC | |
| 305 | ATGGCCTCTGCTCCTATCAGCATGTTGGCCATGTTGTTTACATTGTCTGGACTGAGAGCTCAA | TCR E Vα |
| | TCTGTTGCTCAACCCGAAGATCAGGTGAATGTTGCTGAAGGCAATCCTCTGACAGTGAAGTGC | (nt) codon |
| | ACCTATTCTGTGTCTGGAAACCCCTACCTTTTTTGGTATGTTCAATACCCCAACAGGGGACTG | optimized |
| | CAGTTCCTTCTGAAATACATTACAGGCGATAACCTGGTGAAGGGCAGCTACGGCTTTGAAGCT | |
| | GAATTCAATAAGAGCCAAACCAGCTTCCATCTGAAAAAACCTTCTGCCCTTGTGTCTGATAGC | |
| | GCTCTGTATTTTTGTGCTGTTAGAGGCCCTACATCTGGCACATACAAATACATCTTTGGAACC | |
| | GGAACCAGGCTGAAGGTGTTAGCTAATATTCAGAACCCTGATCCTGCTGTGTACCAGCTGAGA | |
| | GACTCTAAAAGCTCTGACAAGTCTGTGTGCCTTTTCACCGACTTCGACAGCCAGACAAATGTG | |
| | TCTCAGTCTAAGGACTCTGATGTGTACATCACCGACAAGACAGTGTTAGACATGAGGTCTATG | |
| | GACTTCAAGAGCAACTCTGCTGTGGCCTGGTCTAACAAGTCTGATTTTGCTTGTGCTAACGCC | |
| | TTCAACAACAGCATTATTCCTGAAGACACCTTCTTCCCTAGCCCTGAATCTAGCTGTGATGTG | |
| | AAGTTGGTGGAGAAAAGCTTCGAGACCGACACCAACCTTAACTTCCAAAACCTGTCTGTGATT | |
| | GGCTTCAGGATCCTGCTTCTGAAAGTGGCTGGATTTAATCTGCTGATGACACTGAGGCTGTGG | |
| | AGCAGC | |
| 306 | ATGACCAGCATCAGGGCCGTGTTCATTTTCCTGTGGTTACAACTGGATCTTGTGAATGGCGAG | TCR F Vα |
| | AATGTTGAACAACATCCTTCTACACTTTCTGTGCAGGAGGGAGACTCTGCCGTGATTAAGTGT | (nt) codon |
| | ACATATTCTGACTCTGCCAGCAACTACTTCCCCTGGTACAAGCAGGAACTTGGAAAAAGACCT | optimized |
| | CAGCTGATCATCGACATCAGGAGCAATGTGGGCGAAAAGAAAGACCAAAGGATCGCTGTGACC | |
| | TTGAACAAGACAGCCAAACATTTCAGCCTGCACATCACAGAGACCCAACCTGAAGATTCTGCC | |
| | GTGTATTTCTGTGCTGCTCATTTGACAGGAGGAGGCAACAAATTGACCTTTGGCACAGGAACA | |
| | CAGCTTAAAGTGGAACTGAACATTCAGAACCCTGACCCTGCCGTGTACCAATTGAGAGACTCT | |
| | AAAAGCTCTGACAAGAGCGTGTGCCTGTTCACCGACTTTGACTCTCAGACAAATGTGTCTCAG | |
| | TCTAAGGACAGCGACGTGTACATCACCGACAAGACAGTTCTTGACATGAGGTCTATGGACTTC | |
| | AAGAGCAATTCTGCTGTGGCCTGGAGCAACAAATCTGACTTTGCTTGTGCTAACGCTTTCAAC | |
| | AACAGCATCATCCCTGAAGACACCTTTTTCCCTAGCCCTGAATCTAGCTGTGATGTGAAGCTG | |
| | GTGGAGAAAAGCTTTGAGACCGACACCAACCTTAACTTCCAAAACCTGTCTGTGATTGGCTTC | |
| | AGGATCCTGCTGCTTAAAGTTGCCGGCTTTAACCTGTTGATGACCTTAAGGCTGTGGAGCAGC | |
| 307 | ATGGAGACACTGCTGGGAGTGTCTCTTGTGATTTTATGGCTTCAACTGGCTAGGGTGAACTCT | TCR G Vα |
| | CAACAAGGAGAAGAAGATCCTCAAGCCTTGAGCATCCAAGAAGGAGAAAATGCCACCATGAAC | (nt) codon |
| | TGCAGCTACAAGACCAGCATCAACAACCTTCAGTGGTACAGACAGAATTCTGGAAGAGGCCTT | optimized |
| | GTGCACCTGATCTTGATCAGGAGCAATGAAAGAGAGAAGCACAGCGGAAGACTGAGAGTGACA | |
| | CTTGACACCAGCAAAAAGAGCTCTAGCTTGCTGATTACAGCTAGCAGAGCTGCTGACACAGCT | |
| | TCTTATTTTTGTGCTGGAACAGGAGCTAATAACCTGTTCTTTGGCACAGGCACAAGACTGACC | |
| | GTTATTCCCTACATTCAAAATCCCGATCCTGCCGTGTACCAACTGAGAGACTCTAAAAGCTCT | |
| | GACAAAAGCGTGTGCCTGTTCACCGACTTCGACTCTCAGACAAATGTGTCTCAATCTAAGGAC | |
| | AGCGACGTGTACATCACCGACAAGACAGTTCTTGACATGAGGTCTATGGACTTCAAGTCTAAC | |
| | TCTGCTGTGGCCTGGTCTAACAAGTCTGATTTTGCTTGTGCTAACGCCTTCAACAACAGCATT | |
| | ATTCCTGAAGATACCTTCTTCCCCAGCCCTGAATCTAGCTGTGATGTGAAACTGGTGGAGAAA | |
| | AGCTTTGAGACCGACACCAACCTGAACTTCCAAAATCTGTCTGTGATTGGCTTCAGGATCCTG | |
| | CTTCTGAAAGTGGCCGGCTTTAATTTGCTTATGACCCTGAGGCTGTGGTCTAGC | |
| 308 | ATGACCAGCATCAGGGCCGTTTTTATTTTCCTTTGGCTGCAACTGGACCTTGTGAACGGAGAG | TCR H Vα |
| | AATGTTGAGCAACATCCTTCTACACTGTCTGTGCAGGAAGGAGATAGCGCTGTGATCAAGTGT | (nt) codon |
| | ACCTATTCTGACTCTGCCAGCAACTACTTCCCTTGGTACAAGCAGGAGCTTGGAAAAAGACCT | optimized |
| | CAGCTGATCATCGACATCAGGTCTAATGTGGGCGAGAAGAAAGACCAAAGGATCGCTGTGACA | |
| | TTGAACAAGACAGCTAAGCACTTCAGCCTGCATATCACAGAGACCCAACCTGAAGATTCTGCT | |
| | GTTTATTTCTGTGCTGCTCCTTTAGCTGGAGGAGGAGCTGATGGATTAACCTTTGGAAAAGGA | |
| | ACACATCTGATCATCCAACCCTATATCCAAAACCCTGACCCTGCCGTGTACCAGTTAAGAGAC | |
| | TCTAAAAGCTCTGACAAGAGCGTGTGCCTGTTCACCGACTTCGATTCTCAGACAAATGTGTCT | |
| | CAGTCTAAGGACAGCGACGTGTACATCACCGACAAAACAGTGCTTGACATGAGGTCTATGGAC | |
| | TTCAAAAGCAACTCTGCTGTGGCCTGGAGCAACAAGTCTGATTTTGCTTGTGCTAACGCTTTC | |
| | AACAACAGCATCATTCCTGAAGATACCTTCTTCCCCAGCCCTGAATCTAGCTGTGATGTTAAG | |
| | CTGGTGGAGAAAAGCTTTGAGACCGACACCAACCTGAACTTCCAGAACTTGTCTGTGATTGGA | |
| | TTCAGGATCCTGCTGCTGAAAGTTGCCGGCTTTAATTTGTTAATGACCCTGAGGCTGTGGAGC | |
| | AGC | |
| 309 | ATGGAGACCCTGCTGGGCCTGTTAATCTTATGGTTGCAATTGCAATGGGTGTCTAGCAAACAG | TCR I Vα (nt) |
| | GAGGTTACACAGATTCCTGCCGCTTTATCTGTGCCTGAAGGAGAAAACTTGGTTCTGAACTGC | codon |
| | AGCTTCACCGATTCTGCCATTTACAATCTGCAATGGTTTAGGCAGGACCCTGGCAAAGGACTG | optimized |
| | ACATCTCTGTTGTTGATTCAGTCTTCTCAGAGAGAGCAGACATCTGGAAGACTTAATGCCAGC | |
| | CTGGACAAATCTTCTGGAAGGAGCACACTTTATATCGCTGCTTCTCAACCTGGAGATTCTGCT | |
| | ACCTATCTTTGTGCTGTTAGGGGCACAACATCTGGAACCTACAAATACATCTTTGGAACAGGC | |
| | ACCAGGCTGAAGGTGTTAGCTAATATTCAGAACCCTGATCCTGCTGTGTACCAACTGAGAGAC | |
| | TCTAAGAGCTCTGACAAGAGCGTTTGCCTTTTCACCGACTTCGACTCTCAGACAAACGTGTCT | |
| | CAGTCTAAGGACTCTGATGTGTACATCACCGACAAGACCGTGTTGGACATGAGGTCTATGGAC | |
| | TTTAAGAGCAATTCTGCTGTGGCCTGGAGCAACAAGTCTGATTTTGCTTGTGCTAACGCCTTT | |
| | AACAACAGCATCATTCCTGAAGACACCTTTTTCCCCAGCCCTGAATCTAGCTGTGATGTGAAA | |
| | CTGGTGGAGAAATCTTTCGAGACCGACACCAACCTGAACTTTCAAAACCTGTCTGTGATTGGC | |
| | TTCAGGATCCTGCTGCTTAAAGTTGCCGGCTTTAATCTGTTAATGACCCTGAGGCTGTGGAGC | |
| | AGC | |
| 310 | ATGATGAAGAGCCTGAGAGTGCTGCTGGTTATTCTGTGGCTTCAATTAAGCTGGGTTTGGAGC | TCR J Vα (nt) |
| | CAGCAAAAGGAAGTTGAACAAGATCCTGGACCTCTTTCTGTTCCTGAGGGAGCCATTGTTTCT | codon |
| | CTGAATTGCACCTACAGCAACTCTGCCTTCCAGTACTTCATGTGGTACAGACAGTACAGCAGA | optimized |
| | AAAGGCCCTGAGTTGCTGATGTACACATACAGCTCTGGCAACAAAGAAGATGGCAGGTTTACA | |
| | GCTCAGGTGGACAAAAGCAGCAAGTACATCAGCTTGTTCATCAGAGACTCTCAGCCCTCTGAT | |
| | TCTGCCACATATCTTTGTGCTATGAGGGCTACATCTGGCACCTACAAGTATATTTTTGGCACA | |
| | GGAACCAGGCTGAAGGTGTTAGCTAATATCCAAAATCCTGACCCTGCCGTTTACCAGCTGAGA | |
| | GATTCTAAAAGCTCTGACAAGAGCGTGTGCCTTTTCACCGACTTCGACAGCCAAACAAATGTG | |
| | TCTCAGTCTAAGGACAGCGATGTGTACATCACCGACAAGACAGTGCTTGACATGAGGTCTATG | |
| | GACTTCAAGAGCAACTCTGCTGTGGCTTGGAGCAACAAGTCTGACTTTGCTTGTGCTAACGCT | |
| | TTCAACAACAGCATTATTCCTGAAGACACCTTCTTCCCCAGCCCTGAATCTTCTTGTGATGTG | |
| | AAGTTGGTGGAGAAGAGCTTTGAGACCGACACCAACCTGAACTTTCAGAACCTGTCTGTGATT | |
| | GGCTTTAGGATTCTGCTGCTGAAAGTGGCTGGCTTTAATTTGCTTATGACCCTGAGGCTGTGG | |
| | AGCAGC | |
| 311 | ATGAAGCTGGTGACCAGCATCACCGTTCTGCTTTCTTTGGGAATTATGGGAGATGCCAAGACC | TCR K Vα |
| | ACACAGCCTAACTCTATGGAGTCTAACGAAGAAGAGCCTGTGCACTTGCCTTGTAACCACAGC | (nt) codon |
| | ACAATCTCTGGAACAGACTATATTCATTGGTACAGGCAGCTTCCCAGCCAAGGACCTGAGTAT | optimized |
| | GTTATTCATGGACTTACAAGCAACGTGAACAACAGAATGGCCTCTCTGGCTATCGCTGAAGAT | |
| | AGAAAGAGCTCTACATTGATCCTGCACAGAGCTACACTTAGGGATGCTGCTGTTTATTATTGC | |
| | ATCCTGAGAGCCGGCTCTGGAACCTATAAATATATTTTCGGAACAGGCACCAGGCTGAAGGTT | |
| | TTAGCTAATATTCAGAACCCTGATCCTGCCGTTTATCAGTTGAGGGACAGCAAAAGCTCTGAC | |
| | AAGTCTGTGTGCCTTTTCACCGACTTTGACAGCCAGACCAATGTGTCTCAGTCTAAGGACTCT | |
| | GATGTGTACATCACCGACAAGACAGTGCTTGACATGAGGTCTATGGACTTCAAGAGCAACTCT | |
| | GCTGTGGCTTGGAGCAACAAATCTGACTTTGCTTGTGCTAACGCCTTCAACAACAGCATTATT | |
| | CCTGAAGACACCTTCTTTCCCAGCCCTGAATCTAGCTGTGATGTGAAACTGGTGGAGAAGTCT | |
| | TTCGAGACCGACACCAACCTTAACTTCCAGAACCTGTCTGTGATTGGATTCAGGATCCTGCTG | |
| | CTTAAAGTTGCCGGCTTTAATCTGCTGATGACCCTGAGACTGTGGAGCAGC | |
| 312 | ATGGAGACCCTTTTGGGACTGCTTATCCTTTGGTTGCAGCTTCAATGGGTTAGCAGCAAGCAA | TCR L Vα |
| | GAGGTTACCCAAATTCCTGCTGCCTTATCTGTGCCTGAAGGAGAAAACTTGGTTCTGAACTGC | (nt) codon |
| | AGCTTCACAGATAGCGCCATCTATAACTTACAGTGGTTTAGGCAGGACCCTGGCAAAGGACTT | optimized |
| | ACCTCTCTGTTGTTGATTCAGTCTTCTCAGAGAGAGCAGACATCTGGAAGACTTAATGCCAGC | |
| | CTGGACAAATCTTCTGGAAGGAGCACATTGTACATTGCTGCTAGCCAACCTGGAGATTCTGCT | |
| | ACCTATCTGTGTGCTGTTACAAGGACAGGAGCCAACAACCTGTTTTTTGGCACAGGAACAAGA | |
| | CTGACCGTTATTCCCTATATCCAAAACCCTGACCCTGCCGTGTATCAGCTTAGAGACTCTAAA | |
| | AGCTCTGACAAGAGCGTGTGCCTGTTCACCGACTTCGATTCTCAGACAAATGTGTCTCAGTCT | |
| | AAGGACAGCGACGTGTACATCACCGACAAAACAGTGCTTGACATGAGGTCTATGGACTTCAAG | |
| | AGCAATTCTGCTGTGGCCTGGAGCAACAAATCTGACTTTGCTTGTGCTAATGCCTTCAACAAC | |
| | AGCATCATTCCTGAAGACACCTTCTTCCCTAGCCCTGAATCTTCTTGTGATGTGAAGCTGGTG | |
| | GAGAAGAGCTTTGAGACCGACACCAACCTTAACTTCCAAAACCTGAGCGTGATCGGATTTAGG | |
| | ATCCTGCTGCTGAAAGTTGCTGGCTTTAATCTGCTGATGACCCTTAGGCTGTGGAGCAGC | |
| 313 | ATGGAGACACTTCTTGGCCTTCTTATTTTGTGGCTTCAGCTGCAATGGGTGAGCAGCAAACAG | TCR M Vα |
| | GAAGTTACACAAATTCCTGCTGCTCTGTCTGTGCCTGAAGGAGAAAACTTGGTTCTGAACTGT | (nt) codon |
| | AGCTTCACCGATAGCGCCATTTACAATCTGCAATGGTTTAGGCAAGACCCTGGCAAAGGACTG | optimized |
| | ACCTCTCTTTTGCTGATTCAGTCTTCTCAGAGAGAGCAGACATCTGGAAGACTTAATGCCAGC | |
| | CTGGACAAATCTTCTGGAAGGAGCACCTTATACATTGCTGCTTCTCAACCCGGAGATTCTGCT | |
| | ACCTATCTTTGTGCTGTTAGAGGATCTACCTCTGGCACCTACAAATATATCTTCGGAACAGGC | |
| | ACCAGGCTGAAGGTTTTAGCTAATATCCAAAATCCTGACCCTGCCGTGTACCAGCTGAGAGAT | |
| | TCTAAAAGCTCTGACAAAAGCGTGTGCCTGTTCACCGACTTCGACAGCCAAACAAATGTGTCT | |
| | CAATCTAAGGACAGCGACGTGTACATCACCGACAAAACAGTGCTTGACATGAGGTCTATGGAC | |
| | TTCAAAAGCAACTCTGCTGTGGCCTGGAGCAACAAATCTGACTTTGCTTGTGCTAATGCCTTC | |
| | AACAACAGCATTATTCCTGAAGACACCTTCTTCCCCAGCCCTGAATCTAGCTGTGATGTTAAG | |
| | CTGGTTGAGAAGAGCTTTGAGACCGACACCAACCTGAACTTCCAGAACTTATCTGTGATTGGC | |
| | TTCAGGATCCTGCTTCTGAAAGTGGCCGGATTTAATTTGCTGATGACCCTGAGGCTTTGGAGC | |
| | AGC | |
| 314 | ATGACCAGCATCAGGGCCGTTTTTATTTTCCTTTGGTTGCAGCTGGACTTGGTGAACGGAGAA | TCR N Vα |
| | AATGTTGAACAGCATCCTTCTACCCTGTCTGTGCAAGAAGGAGACTCTGCTGTGATCAAGTGT | (nt) codon |
| | ACCTACTCTGACTCTGCCAGCAACTACTTCCCTTGGTACAAGCAAGAGCTTGGAAAGAGACCT | optimized |
| | CAGCTGATCATCGACATTAGGTCTAATGTGGGCGAGAAGAAGGACCAAAGGATCGCTGTTACA | |
| | TTGAACAAGACAGCCAAACATTTTAGCCTGCACATTACAGAGACCCAACCTGAAGACAGCGCT | |
| | GTTTACTTTTGTGCTGCTATTGTGGGCAACCAGTTCTATTTTGGCACAGGCACATCTTTGACC | |
| | GTGATTCCTAATATCCAAAACCCTGACCCTGCCGTGTACCAACTGAGAGACTCTAAATCTTCT | |
| | GACAAGAGCGTGTGCCTGTTCACCGACTTCGACTCTCAAACAAATGTGTCTCAGTCTAAGGAC | |
| | AGCGACGTGTACATCACCGACAAAACAGTGCTTGACATGAGGTCTATGGACTTCAAGAGCAAC | |
| | TCTGCTGTGGCTTGGAGCAACAAGTCTGACTTTGCTTGTGCTAATGCCTTCAACAACAGCATC | |
| | ATCCCTGAAGACACCTTCTTTCCTAGCCCTGAATCTAGCTGTGATGTGAAGCTGGTGGAGAAG | |
| | AGCTTTGAGACAGACACCAACCTTAACTTCCAGAACCTGAGCGTGATTGGCTTTAGGATCCTG | |
| | TTACTGAAAGTTGCCGGCTTTAACCTGCTGATGACCCTTAGGTTATGGAGCAGC | |
| 315 | ATGACCAGCATCAGGGCTGTTTTTATTTTCCTGTGGCTGCAGCTGGATCTTGTGAATGGAGAG | TCR O Vα |
| | AATGTGGAACAACATCCTTCTACCTTAAGCGTGCAAGAGGGAGATAGCGCTGTGATCAAGTGT | (nt) codon |
| | ACCTATTCTGACTCTGCCAGCAACTACTTCCCTTGGTACAAGCAGGAGCTTGGAAAAAGACCT | optimized |
| | CAGCTGATCATCGACATCAGGTCTAATGTGGGCGAGAAGAAAGACCAAAGGATCGCTGTGACA | |
| | TTGAACAAGACAGCCAAACATTTCAGCCTGCACATCACAGAGACCCAACCTGAAGATTCTGCT | |
| | GTGTACTTCTGTGCTATGAGAAATAACAATGACATGAGGTTCGGAGCCGGCACCAGACTGACA | |
| | GTTAAACCTAATATCCAAAACCCTGATCCTGCCGTGTACCAGCTGAGAGACTCTAAATCTTCT | |
| | GACAAGTCTGTGTGCCTGTTCACCGACTTCGACAGCCAAACAAATGTGTCTCAGTCTAAGGAC | |
| | AGCGATGTGTACATCACCGACAAGACAGTGCTTGACATGAGGTCTATGGACTTCAAGAGCAAC | |
| | TCTGCTGTTGCCTGGAGCAACAAATCTGACTTTGCTTGCGCTAACGCTTTCAACAACAGCATC | |
| | ATCCCTGAAGATACCTTCTTCCCTAGCCCTGAATCTAGCTGTGATGTGAAGCTGGTGGAGAAA | |
| | AGCTTTGAGACCGACACCAACCTTAACTTCCAGAACCTGTCTGTGATTGGCTTCAGAATCCTG | |
| | CTGCTGAAAGTTGCTGGCTTCAATCTGCTGATGACCTTAAGGCTGTGGAGCAGC | |
| 316 | ATGCTGCTGCTGCTGATCCCTGTGCTGGGAATGATTTTTGCCTTAAGAGATGCCAGAGCTCAG | TCR P Vα |
| | TCTGTGAGCCAGCATAATCACCATGTGATTCTGTCTGAAGCTGCTTCTCTGGAGTTGGGATGC | (nt) codon |
| | AACTATAGCTATGGAGGCACAGTGAATCTGTTCTGGTATGTGCAGTATCCTGGACAACACCTG | optimized |
| | CAGCTGCTGTTAAAGTACTTCTCTGGAGATCCTCTGGTTAAAGGCATCAAGGGCTTTGAGGCT | |
| | GAGTTCATCAAGAGCAAGTTCAGCTTCAACCTGAGAAAGCCCTCTGTGCAATGGTCTGATACA | |
| | GCTGAGTATTTCTGTGCTGTTAGGGATTCTGGCGCTGGATCTTACCAACTGACATTCGGAAAA | |
| | GGCACCAAACTTAGCGTGATCCCTAATATCCAAAATCCTGACCCTGCTGTGTACCAGCTGAGA | |
| | GACTCTAAAAGCTCTGACAAAAGCGTGTGCCTTTTCACCGACTTCGACAGCCAGACAAATGTG | |
| | TCTCAATCTAAGGACAGCGATGTGTACATCACCGACAAGACAGTGCTTGACATGAGGTCTATG | |
| | GACTTCAAGAGCAACTCTGCTGTTGCCTGGAGCAACAAATCTGATTTTGCTTGCGCTAACGCC | |
| | TTCAACAACAGCATCATTCCTGAAGACACCTTCTTCCCTTCTCCTGAGTCTTCTTGTGATGTG | |
| | AAGCTGGTGGAGAAGAGCTTTGAGACCGACACCAACCTTAACTTCCAAAACCTGTCTGTGATT | |
| | GGCTTCAGGATCCTTTTGCTGAAAGTGGCCGGATTTAATCTGCTTATGACACTTAGGCTGTGG | |
| | AGCAGC | |
| 317 | ATGACCAGCATCAGGGCCGTGTTTATTTTTCTGTGGCTGCAGTTAGACTTGGTGAATGGAGAA | TCR Q Vα |
| | AATGTGGAGCAGCATCCCTCTACCTTATCTGTTCAGGAAGGAGATTCTGCTGTGATCAAGTGC | (nt) codon |
| | ACCTATTCTGACTCTGCCAGCAACTACTTCCCTTGGTACAAGCAAGAGCTGGGAAAAAGACCT | optimized |
| | CAGCTGATCATCGACATTAGGTCTAATGTGGGCGAGAAGAAGGACCAAAGGATCGCTGTTACA | |
| | TTGAACAAGACAGCTAAACATTTCAGCCTGCACATTACAGAGACCCAACCTGAAGACAGCGCT | |
| | GTGTACTTTTGTGCTGCTTCTAATCCTACAGGAGCCAACAGCAAGCTGACCTTTGGAAAAGGC | |
| | ATTACACTGTCTGTTAGACCTGATATTCAGAACCCTGACCCTGCCGTTTATCAGCTGAGAGAC | |
| | TCTAAAAGCTCTGACAAGAGCGTGTGCCTTTTCACCGACTTCGACTCTCAGACAAATGTGTCT | |
| | CAGTCTAAGGACAGCGATGTGTACATCACCGACAAGACAGTGCTTGACATGAGGTCTATGGAT | |
| | TTCAAGAGCAACTCTGCTGTGGCCTGGAGCAACAAATCTGACTTTGCTTGTGCTAATGCCTTC | |
| | AACAACAGCATCATTCCTGAAGACACCTTCTTCCCTAGCCCTGAATCTAGCTGTGATGTTAAG | |
| | CTGGTGGAGAAGAGCTTTGAGACCGACACCAACCTTAACTTCCAAAACCTTTCTGTGATTGGC | |
| | TTTAGAATCCTGCTGCTGAAAGTGGCCGGATTTAATCTGCTTATGACCCTTAGGCTGTGGAGC | |
| | AGC | |
| 318 | ATGGAGACCCTGCTGGGCGTGTCTTTGGTTATTCTTTGGCTGCAATTAGCTAGAGTGAACTCT | TCR R Vα |
| | CAACAAGGAGAAGAGGATCCTCAGGCTTTGTCTATCCAAGAGGGAGAAAATGCCACCATGAAC | (nt) codon |
| | TGCAGCTACAAGACCAGCATCAACAACCTTCAGTGGTACAGACAGAATTCTGGAAGAGGCCTT | optimized |
| | GTGCACCTGATCTTGATCAGGAGCAATGAAAGAGAGAAGCACAGCGGAAGACTGAGAGTGACA | |
| | CTTGACACCTCTAAGAAATCTTCTAGCTTGTTGATTACCGCTAGCAGGGCCGCTGATACAGCT | |
| | TCTTACTTTTGTGCTACAGAAATGAACAGCAACTACCAGTTAATCTGGGGCGCTGGCACAAAG | |
| | CTGATCATTAAGCCTGATATTCAGAATCCTGATCCTGCCGTGTACCAGCTGAGAGACTCTAAG | |
| | TCTTCTGATAAGTCTGTGTGCCTGTTCACCGACTTCGACAGCCAGACAAATGTGTCTCAATCT | |
| | AAGGACAGCGATGTGTACATCACCGACAAGACAGTGCTTGACATGAGGTCTATGGACTTCAAG | |
| | AGCAACTCTGCTGTTGCCTGGAGCAACAAATCTGACTTTGCTTGTGCTAACGCCTTCAATAAC | |
| | AGCATTATTCCCGAAGATACCTTCTTCCCCAGCCCTGAATCTAGCTGTGATGTGAAACTGGTG | |
| | GAGAAAAGCTTTGAGACCGACACCAACCTGAACTTCCAGAACCTGTCTGTTATTGGCTTCAGG | |
| | ATCCTGCTGCTTAAAGTTGCCGGCTTTAATCTGCTTATGACCCTTAGGCTGTGGAGCAGC | |
| 319 | ATGAGGCTGGTGGCCAGAGTGACAGTGTTTCTGACCTTTGGAACAATCATTGACGCTAAAACA | TCR S Vα |
| | ACACAACCCCCCTCTATGGATTGTGCTGAAGGAAGAGCTGCCAATTTACCTTGCAACCACTCT | (nt) codon |
| | ACCATCTCTGGCAATGAGTATGTGTATTGGTATAGGCAGATTCACAGCCAGGGCCCTCAGTAC | optimized |
| | ATCATTCATGGACTTAAGAACAACGAGACCAACGAGATGGCCAGCCTGATTATCACAGAAGAT | |
| | AGGAAGAGCTCTACCTTGATCTTACCTCACGCCACCCTTAGAGATACAGCTGTGTACTACTGC | |
| | ATTGTTAGAGCCAGCACCTCTGGAACCTACAAATACATCTTTGGAACAGGCACAAGGCTGAAG | |
| | GTGTTAGCTAATATCCAGAATCCTGATCCTGCCGTGTATCAGCTGAGAGACTCTAAAAGCTCT | |
| | GACAAGAGCGTTTGCCTGTTCACCGACTTCGACTCTCAGACAAATGTGTCTCAGTCTAAGGAC | |
| | AGCGATGTGTACATCACCGACAAGACAGTGCTTGACATGAGGTCTATGGACTTCAAGAGCAAC | |
| | TCTGCTGTTGCCTGGAGCAACAAATCTGACTTTGCCTGTGCTAATGCCTTCAACAACAGCATC | |
| | ATCCCTGAAGACACCTTTTTTCCCAGCCCTGAATCTAGCTGTGATGTGAAGCTGGTGGAGAAA | |
| | AGCTTTGAGACCGACACCAACCTTAACTTCCAGAACCTTTCTGTTATTGGATTCAGGATCCTG | |
| | CTGCTGAAAGTGGCCGGCTTTAATCTGTTGATGACACTTAGGCTGTGGAGCAGC | |
| 320 | ATGGAGACACTGCTGGGAGTGTCTTTGGTGATTCTTTGGCTTCAACTTGCTAGGGTGAACTCT | TCR T Vα |
| | CAACAAGGAGAAGAGGATCCTCAAGCCTTGAGCATCCAAGAAGGAGAAAATGCCACCATGAAC | (nt) codon |
| | TGCAGCTACAAGACCAGCATCAACAACCTTCAGTGGTACAGACAGAATTCTGGAAGAGGCCTT | optimized |
| | GTGCACCTGATCTTGATCAGGAGCAATGAAAGAGAGAAGCACAGCGGAAGACTTAGAGTGACC | |
| | TTGGACACCAGCAAAAAAAGCTCTAGCCTGCTGATTACAGCTAGCAGAGCTGCTGACACAGCT | |
| | TCTTATTTTTGTGCTACCCCTTCTGGCAATACACCTCTTGTGTTTGGAAAGGGCACAAGACTT | |
| | TCTGTGATTGCTAATATCCAGAACCCTGATCCTGCCGTGTATCAGCTGAGAGATTCTAAAAGC | |
| | TCTGACAAGAGCGTGTGCCTGTTCACCGACTTCGACTCTCAAACAAATGTGTCTCAGTCTAAG | |
| | GACAGCGACGTGTACATCACCGACAAAACAGTGCTTGACATGAGGTCTATGGACTTCAAAAGC | |
| | AACTCTGCTGTGGCCTGGTCTAACAAATCTGACTTTGCTTGTGCTAACGCCTTCAACAACAGC | |
| | ATCATTCCTGAAGATACCTTTTTCCCCAGCCCTGAATCTAGCTGTGATGTGAAGCTGGTGGAA | |
| | AAAAGCTTTGAGACCGACACCAACCTGAACTTCCAGAACCTGTCTGTGATTGGATTCAGGATC | |
| | CTTCTGCTGAAAGTGGCTGGCTTTAATCTGCTGATGACCCTTAGACTGTGGAGCAGC | |
| 321 | ATGGGCACAAGCCTGCTTTGCTGGATGGCCTTATGTTTATTAGGAGCTGATCACGCTGATACA | TCR A Vβ |
| | GGAGTTTCTCAGGATCCTAGGCACAAGATCACCAAAAGGGGCCAGAATGTGACATTCAGGTGT | (nt) codon |
| | GATCCTATTAGCGAACACAATAGGCTGTATTGGTACAGGCAGACATTAGGCCAAGGACCTGAG | optimized |
| | TTTCTGACATACTTCCAGAACGAGGCTCAACTTGAAAAGTCTAGGCTGCTTTCTGATAGGTTC | |
| | AGCGCTGAGAGGCCTAAAGGATCTTTCTCTACCTTGGAGATTCAGAGGACAGAACAAGGCGAT | |
| | TCTGCTATGTATCTTTGTGCTAGCACCCCTGGAACCGTTTATAATGAGCAATTTTTCGGACCT | |
| | GGCACAAGGCTGACCGTGCTTGAAGATCTGAAGAATGTTTTTCCTCCTGAAGTGGCCGTTTTT | |
| | GAGCCTTCTGAAGCTGAGATTAGCCATACACAGAAAGCTACACTGGTGTGTCTGGCTACAGGC | |
| | TTTTACCCTGATCATGTTGAACTGTCTTGGTGGGTTAATGGAAAGGAAGTTCATTCTGGAGTG | |
| | AGCACAGATCCCCAACCCCTTAAAGAACAACCTGCTCTGAATGATAGCAGGTACTGTCTGAGC | |
| | TCTAGGCTTAGGGTTTCTGCCACATTTTGGCAAAATCCCAGGAACCACTTTAGGTGCCAAGTG | |
| | CAGTTTTACGGCCTTAGCGAAAATGACGAATGGACCCAAGACAGAGCTAAACCTGTGACCCAA | |
| | ATTGTTTCTGCTGAAGCTTGGGGAAGAGCTGATTGTGGCTTCACAAGCGAATCTTACCAACAA | |
| | GGCGTTCTGTCTGCCACCATTCTGTACGAGATCTTGTTAGGCAAAGCTACACTGTATGCTGTT | |
| | CTGGTTTCTGCCTTGGTTCTGATGGCCATGGTGAAGAGAAAGGATAGCAGAGGC | |
| 322 | ATGGGCACCAGCTTACTGTGTTGGATGGCCTTATGTTTATTGGGAGCTGATCATGCTGATACA | TCR B Vβ |
| | GGAGTGAGCCAGGACCCTAGACATAAAATCACCAAAAGGGGCCAGAATGTGACCTTCAGGTGT | (nt) codon |
| | GATCCTATTTCTGAACATAACAGGCTGTATTGGTACAGGCAAACCTTAGGACAGGGCCCTGAG | optimized |
| | TTTTTGACATACTTCCAGAACGAAGCTCAGCTTGAGAAGAGCAGGTTACTGTCTGATAGATTC | |
| | TCTGCTGAGAGGCCTAAGGGCTCTTTTAGCACCTTAGAGATCCAAAGGACAGAACAAGGAGAT | |
| | TCTGCTATGTATCTTTGTGCTGCCCCCCCTGATACCTATAATTCTCCTCTGCATTTTGGCAAT | |
| | GGAACAAGGCTGACCGTTACAGAGGATCTGAACAAGGTGTTTCCTCCTGAAGTTGCTGTGTTC | |
| | GAACCTAGCGAAGCTGAGATCTCTCATACACAAAAGGCTACACTGGTGTGTCTGGCTACAGGC | |
| | TTCTTTCCCGATCATGTTGAATTAAGCTGGTGGGTGAATGGAAAAGAAGTTCACTCTGGAGTT | |
| | AGCACAGATCCCCAACCCCTTAAAGAACAACCTGCTCTGAACGATAGCAGATACTGCCTTAGC | |
| | TCTAGACTTAGGGTTAGCGCCACCTTTTGGCAAAATCCCAGAAACCATTTTAGGTGCCAGGTT | |
| | CAGTTCTACGGCCTGTCTGAAAATGATGAATGGACCCAAGATAGGGCCAAACCTGTTACACAA | |
| | ATTGTTTCTGCCGAAGCTTGGGGAAGAGCTGACTGTGGATTTACATCTGTTAGCTATCAGCAA | |
| | GGCGTGCTGTCTGCCACCATCCTGTATGAAATCCTTTTAGGCAAAGCTACCCTGTATGCTGTG | |
| | TTAGTGTCTGCCTTAGTGCTTATGGCCATGGTGAAGAGAAAGGACTTC | |
| 323 | ATGGGCACAAGCCTTCTGTGTTGGATGGCTTTGTGTTTACTTGGAGCTGATCACGCTGATACA | TCR C Vβ |
| | GGCGTGTCTCAAGACCCTAGACATAAGATTACCAAGAGGGGCCAGAATGTGACATTCAGGTGT | (nt) codon |
| | GATCCTATTTCTGAGCATAACAGGCTGTATTGGTATAGGCAAACATTGGGCCAAGGCCCTGAG | optimized |
| | TTCCTTACATACTTTCAGAACGAAGCTCAACTTGAGAAAAGCAGGTTGTTATCTGATAGGTTC | |
| | AGCGCCGAAAGGCCTAAGGGATCTTTCTCTACACTTGAGATTCAGAGAACCGAACAAGGCGAT | |
| | AGCGCTATGTATCTGTGTGCCTCTACAGAACTGTCTGGAAACACCATCTACTTTGGAGAGGGC | |
| | TCTTGGCTGACAGTTGTTGAGGACTTAAACAAGGTTTTTCCTCCCGAGGTGGCTGTGTTTGAA | |
| | CCTTCTGAAGCTGAAATTTCTCACACCCAGAAGGCTACCTTAGTTTGTCTTGCCACAGGCTTT | |
| | TTTCCCGATCACGTTGAATTGAGCTGGTGGGTTAATGGCAAGGAAGTGCATTCTGGAGTTTCT | |
| | ACAGATCCCCAGCCTCTTAAGGAACAACCTGCCTTGAACGATTCTAGATACTGTCTGAGCTCT | |
| | AGGCTGAGGGTTTCTGCTACATTTTGGCAAAATCCTAGGAACCACTTCAGGTGCCAGGTGCAG | |
| | TTCTACGGATTAAGCGAAAACGATGAATGGACACAGGACAGGGCTAAACCTGTTACACAAATT | |
| | GTTTCTGCCGAAGCTTGGGGAAGAGCTGATTGTGGATTCACCTCTGTTAGCTATCAGCAAGGA | |
| | GTGCTGTCTGCCACAATCCTGTATGAGATCTTACTTGGCAAAGCCACCTTATATGCTGTTCTT | |
| | GTTAGCGCCCTTGTGTTGATGGCCATGGTGAAGAGAAAGGACTTC | |
| 324 | ATGGGCACCAGCTTACTTTGCTGGATGGCTCTGTGTTTATTAGGAGCTGATCATGCTGATACA | TCR D Vβ |
| | GGAGTGAGCCAAGATCCCAGGCATAAGATTACAAAGAGGGGCCAGAATGTGACCTTCAGGTGT | (nt) codon |
| | GACCCTATTTCTGAACACAACAGACTGTATTGGTACAGGCAGACATTAGGCCAAGGCCCTGAG | optimized |
| | TTTCTGACATATTTCCAGAACGAGGCTCAACTTGAGAAGTCTAGGCTGTTATCTGACAGGTTC | |
| | TCTGCTGAGAGGCCTAAAGGCTCTTTTAGCACATTGGAGATCCAAAGAACCGAACAGGGCGAT | |
| | TCTGCCATGTATCTTTGTGCTTCTAGCCTTGTGTCTGGCAATGAGCAATTTTTTGGACCTGGA | |
| | ACAAGGCTGACCGTGCTTGAAGACCTGAAAAACGTTTTTCCTCCTGAAGTGGCTGTGTTCGAA | |
| | CCTTCTGAAGCTGAGATTAGCCATACCCAGAAAGCCACATTAGTTTGTCTTGCCACAGGCTTT | |
| | TACCCCGATCATGTGGAACTTTCTTGGTGGGTTAATGGCAAGGAGGTTCATTCTGGAGTGTCT | |
| | ACAGACCCTCAACCTCTGAAAGAGCAACCTGCTTTGAATGACAGCAGGTATTGTTTGTCTAGC | |
| | AGGCTGAGGGTTTCTGCTACATTCTGGCAAAATCCTAGGAATCACTTCAGGTGCCAGGTGCAG | |
| | TTTTACGGACTGAGCGAAAATGATGAATGGACACAGGATAGGGCCAAACCTGTTACACAAATT | |
| | GTTTCTGCTGAGGCTTGGGGAAGAGCTGATTGTGGATTCACAAGCGAATCTTATCAGCAAGGC | |
| | GTTCTGTCTGCCACCATCCTGTATGAGATCCTTCTTGGAAAAGCTACCTTATATGCTGTGCTG | |
| | GTTTCTGCCTTGGTGCTTATGGCCATGGTTAAGAGAAAGGACAGCAGAGGC | |
| 325 | ATGGGCACCTCTCTTCTTTGCTGGATGGCTCTGTGTTTATTAGGAGCTGATCACGCCGATACA | TCR E Vβ |
| | GGAGTTTCTCAAGATCCCAGGCACAAAATTACCAAGAGGGGCCAGAACGTTACATTCAGGTGT | (nt) codon |
| | GATCCCATTTCTGAACACAATAGACTTTATTGGTACAGGCAAACCCTGGGCCAAGGCCCTGAA | optimized |
| | TTTCTGACATATTTTCAGAACGAGGCTCAACTGGAGAAGTCTAGGCTGCTGTCTGATAGATTT | |
| | TCTGCTGAGAGGCCTAAGGGCTCTTTCTCTACCCTGGAAATTCAAAGGACAGAGCAAGGAGAT | |
| | AGCGCCATGTATCTTTGTGCTAGCAGCCTTGTTTCTGGCAACGAGCAATTTTTTGGACCTGGA | |
| | ACAAGGCTGACCGTGCTTGAAGACCTGAAAAACGTTTTTCCTCCTGAGGTTGCTGTGTTTGAA | |
| | CCTTCTGAGGCTGAAATCAGCCATACCCAAAAGGCCACATTAGTTTGTCTGGCCACAGGCTTC | |
| | TATCCTGACCATGTGGAATTATCTTGGTGGGTTAACGGCAAAGAAGTGCATTCTGGAGTTTCT | |
| | ACAGATCCTCAGCCCCTTAAAGAACAGCCTGCTCTTAATGACAGCAGGTATTGCTTATCTTCT | |
| | AGGCTGAGGGTGTCTGCTACATTTTGGCAGAACCCTAGGAATCATTTTAGGTGCCAGGTGCAG | |
| | TTTTACGGACTGAGCGAGAATGATGAATGGACACAAGACAGAGCCAAACCCGTTACACAAATC | |
| | GTTTCTGCTGAAGCTTGGGGAAGAGCTGATTGTGGCTTCACATCTGAATCTTATCAGCAGGGA | |
| | GTGTTGAGCGCCACCATTCTGTACGAGATTTTGCTTGGAAAAGCCACATTGTATGCCGTGTTG | |
| | GTTTCTGCTCTGGTGTTGATGGCTATGGTGAAGAGAAAGGACAGCAGAGGC | |
| 326 | ATGGGCACAAGCTTACTGTGTTGGATGGCTCTTTGTTTGCTTGGAGCTGATCATGCTGATACA | TCR F Vβ |
| | GGAGTGTCTCAGGATCCTAGACACAAGATCACAAAGAGGGGCCAGAATGTGACATTCAGGTGT | (nt) codon |
| | GATCCCATTAGCGAACATAACAGACTTTATTGGTACAGGCAAACCCTGGGCCAAGGACCTGAG | optimized |
| | TTTCTGACATATTTTCAGAACGAGGCTCAACTGGAAAAATCTAGGCTTCTTAGCGATAGGTTC | |
| | AGCGCTGAGAGGCCTAAAGGATCTTTTAGCACCTTGGAAATCCAAAGGACCGAACAAGGCGAT | |
| | AGCGCCATGTATTTATGTGCTTCTTCTTCTAGGGCTGGAGGAGAAACACAATATTTTGGACCT | |
| | GGCACCAGGTTGTTAGTGCTGGAGGACTTGAAGAATGTTTTTCCTCCCGAGGTGGCTGTTTTC | |
| | GAACCCTCTGAAGCTGAAATTTCTCATACCCAGAAGGCCACATTAGTGTGCCTGGCTACAGGA | |
| | TTTTACCCTGATCATGTTGAGCTTTCTTGGTGGGTGAACGGAAAAGAAGTTCATTCTGGCGTG | |
| | AGCACAGATCCTCAACCTCTTAAAGAGCAACCTGCCTTGAATGACTCTAGGTATTGTTTAAGC | |
| | TCTAGGCTGAGGGTTAGCGCCACCTTTTGGCAGAATCCTAGAAATCATTTTAGGTGCCAGGTG | |
| | CAATTCTACGGCCTGTCTGAAAATGACGAATGGACACAAGACAGGGCTAAACCTGTGACACAA | |
| | ATTGTTAGCGCTGAAGCTTGGGGAAGAGCTGATTGTGGCTTTACCTCTGAAAGCTATCAGCAA | |
| | GGAGTTCTGAGCGCCACCATTCTGTATGAGATCCTGCTTGGAAAAGCTACATTGTATGCCGTT | |
| | CTTGTTTCTGCCCTGGTGTTGATGGCCATGGTTAAGAGGAAAGATAGCAGAGGC | |
| 327 | ATGGGAACCAGCCTGCTTTGTTGGATGGCTTTATGTCTTCTTGGAGCTGATCACGCTGATACA | TCR G Vβ |
| | GGAGTGTCTCAGGATCCTAGACACAAAATCACCAAGAGGGGCCAGAATGTTACATTCAGGTGT | (nt) codon |
| | GATCCCATTTCTGAGCACAATAGGCTGTACTGGTATAGGCAAACACTTGGACAAGGCCCTGAA | optimized |
| | TTCCTGACATACTTCCAGAACGAGGCTCAACTTGAGAAGTCTAGGCTGTTATCTGATAGGTTC | |
| | TCTGCTGAAAGGCCCAAAGGATCTTTTAGCACCTTGGAGATTCAGAGGACCGAACAAGGAGAC | |
| | TCTGCTATGTACCTTTGCGCTAGCTCTTTGATCAGAGGAGAAACCCAGTATTTTGGACCTGGC | |
| | ACAAGGCTTCTGGTGTTAGAGGACTTAAAAAACGTGTTCCCTCCCGAGGTTGCTGTGTTCGAA | |
| | CCTTCTGAAGCTGAAATTTCTCACACCCAGAAGGCTACATTGGTTTGTCTGGCCACAGGATTT | |
| | TATCCCGATCATGTGGAATTAAGCTGGTGGGTGAATGGCAAAGAAGTTCATTCTGGAGTTAGC | |
| | ACAGATCCCCAGCCTTTAAAGGAGCAACCTGCTCTTAATGACAGCAGATACTGCCTGTCTTCT | |
| | AGGCTTAGGGTGTCTGCTACATTTTGGCAAAACCCTAGGAACCACTTCAGGTGTCAAGTGCAG | |
| | TTTTACGGCCTTTCTGAAAATGATGAGTGGACCCAAGACAGGGCCAAACCTGTTACCCAAATT | |
| | GTTTCTGCTGAAGCTTGGGGAAGAGCTGACTGTGGCTTTACATCTGAGAGCTATCAACAAGGA | |
| | GTGCTGTCTGCCACCATCCTGTACGAAATCCTTCTTGGAAAAGCTACCTTATATGCCGTGTTA | |
| | GTGTCTGCCCTTGTGCTTATGGCCATGGTGAAGAGAAAAGATAGCAGAGGC | |
| 328 | ATGGGAACCAGCTTGTTGTGTTGGATGGCTCTTTGTCTTTTAGGAGCTGACCATGCTGATACA | TCR H Vβ |
| | GGAGTTAGCCAAGATCCCAGGCACAAAATCACCAAAAGGGGCCAGAATGTGACATTCAGGTGT | (nt) codon |
| | GACCCTATCTCTGAACACAATAGGCTTTATTGGTATAGGCAGACACTGGGCCAAGGCCCTGAA | optimized |
| | TTTCTGACATACTTTCAGAATGAGGCTCAGCTTGAGAAATCTAGGTTGCTGTCTGATAGGTTC | |
| | AGCGCTGAAAGGCCTAAAGGAAGCTTTAGCACCTTGGAGATCCAAAGGACAGAACAAGGAGAT | |
| | AGCGCCATGTATCTGTGTGCTTCTAGCACAACACTTATCACAGGATACACCTTCGGAAGCGGA | |
| | ACAAGGTTAACCGTTGTTGAGGATCTGAACAAAGTGTTTCCTCCTGAGGTTGCTGTGTTTGAG | |
| | CCCTCTGAAGCTGAGATTTCTCATACCCAGAAAGCCACATTGGTTTGCTTGGCCACAGGCTTT | |
| | TTTCCCGATCATGTGGAATTGTCTTGGTGGGTTAATGGCAAAGAAGTGCACTCTGGAGTGTCT | |
| | ACCGATCCTCAACCTCTTAAAGAACAACCTGCTCTGAACGACTCTAGGTACTGCCTTTCTTCT | |
| | AGGTTGAGGGTTTCTGCTACCTTTTGGCAGAATCCCAGGAATCATTTCAGGTGCCAGGTGCAA | |
| | TTCTATGGACTGAGCGAAAACGATGAATGGACACAGGACAGAGCTAAACCCGTTACACAAATT | |
| | GTTTCTGCTGAGGCTTGGGGAAGAGCTGATTGTGGCTTTACCTCTGTTAGCTATCAGCAAGGA | |
| | GTGCTGTCTGCCACAATCCTGTACGAAATTCTGCTTGGAAAAGCCACACTGTATGCTGTTCTG | |
| | GTGTCTGCTCTTGTGCTTATGGCTATGGTGAAGAGAAAGGACTTC | |
| 329 | ATGGGCACCAGCCTGCTTTGTTGGATGGCTTTATGTCTTTTAGGAGCTGATCACGCCGATACA | TCR I Vβ (nt) |
| | GGAGTTTCTCAGGACCCTAGACATAAGATCACAAAGAGGGGCCAGAACGTGACATTCAGGTGT | codon |
| | GATCCTATTTCTGAGCATAACAGGCTTTATTGGTACAGGCAGACCTTAGGCCAAGGACCTGAG | optimized |
| | TTTCTGACATATTTCCAGAACGAAGCCCAGCTTGAGAAATCTAGGTTGTTGTCTGATAGGTTC | |
| | TCTGCTGAGAGGCCTAAGGGATCTTTCAGCACATTGGAGATTCAGAGAACAGAGCAAGGCGAT | |
| | AGCGCCATGTATCTGTGTGCTTCTTCTTTTCTTGCTGGAGAGACACAATATTTTGGACCTGGA | |
| | ACAAGGCTTCTGGTGCTGGAGGACCTGAAAAATGTTTTTCCTCCTGAAGTGGCTGTTTTCGAG | |
| | CCTTCTGAAGCTGAAATCAGCCATACCCAAAAAGCCACACTGGTGTGTTTAGCCACAGGATTC | |
| | TATCCCGACCATGTTGAATTGTCTTGGTGGGTGAATGGCAAGGAAGTTCACTCTGGAGTTTCT | |
| | ACAGATCCCCAACCTCTTAAAGAACAGCCTGCCTTGAATGACAGCAGATATTGCCTGAGCAGC | |
| | AGGTTAAGAGTTAGCGCTACCTTTTGGCAAAATCCCAGAAACCATTTCAGGTGCCAAGTGCAG | |
| | TTCTACGGCCTTAGCGAAAATGATGAATGGACACAAGATAGGGCCAAACCCGTTACACAAATT | |
| | GTTTCTGCTGAAGCTTGGGGAAGAGCTGATTGTGGATTCACAAGCGAAAGCTATCAACAAGGC | |
| | GTGCTGTCTGCTACCATCCTGTATGAAATTCTGCTTGGCAAAGCTACATTGTATGCTGTGCTT | |
| | GTTTCTGCCCTTGTGCTGATGGCTATGGTGAAGAGAAAGGATAGCAGAGGC | |
| 330 | ATGGGAACCTCTCTGCTGTGTTGGATGGCTTTGTGTCTTTTAGGAGCTGATCACGCTGATACA | TCR J Vβ (nt) |
| | GGCGTTAGCCAAGATCCCAGACACAAAATCACAAAGAGGGGACAGAATGTTACATTCAGGTGT | codon |
| | GACCCCATCTCTGAACACAACAGGTTATATTGGTACAGGCAGACATTGGGCCAGGGACCTGAG | optimized |
| | TTTTTAACATACTTCCAGAACGAAGCTCAACTTGAGAAATCTAGGCTGCTGTCTGATAGGTTC | |
| | TCTGCCGAAAGGCCTAAAGGAAGCTTTTCTACCCTGGAGATCCAAAGAACAGAACAAGGCGAT | |
| | AGCGCTATGTATTTGTGTGCTGTTCCTGGAGGAAGCAGCTACAATGAACAATTTTTTGGACCC | |
| | GGAACCAGGCTTACCGTTTTGGAAGACCTGAAAAATGTTTTCCCTCCCGAAGTTGCTGTGTTT | |
| | GAGCCTTCTGAAGCTGAGATCTCTCATACACAAAAGGCCACCTTAGTTTGTCTGGCCACAGGA | |
| | TTTTACCCTGATCACGTTGAATTGTCTTGGTGGGTGAACGGAAAAGAAGTTCATTCTGGCGTG | |
| | TCTACAGATCCCCAACCTCTTAAGGAACAACCTGCCTTGAATGACAGCAGATACTGCCTTAGC | |
| | TCTAGACTTAGGGTGTCTGCTACATTCTGGCAGAATCCTAGGAACCACTTTAGGTGTCAGGTT | |
| | CAGTTTTACGGCCTGAGCGAAAATGATGAGTGGACACAAGATAGGGCCAAACCTGTTACACAA | |
| | ATTGTTTCTGCTGAAGCCTGGGGAAGAGCTGACTGTGGCTTTACATCTGAATCTTATCAGCAA | |
| | GGAGTGCTGAGCGCCACCATCCTGTATGAAATTTTGCTTGGCAAAGCTACATTGTATGCCGTG | |
| | CTGGTTTCTGCTCTTGTGCTTATGGCCATGGTGAAAAGAAAGGACAGCAGAGGC | |
| 331 | ATGGGCACCTCTTTACTTTGCTGGATGGCTCTGTGTTTACTTGGAGCTGATCATGCTGATACA | TCR K Vβ |
| | GGAGTGAGCCAAGATCCCAGACATAAGATCACAAAGAGGGGCCAGAATGTGACCTTCAGGTGT | (nt) codon |
| | GACCCTATTTCTGAACACAACAGACTTTATTGGTATAGGCAGACCTTGGGACAGGGCCCTGAA | optimized |
| | TTTTTAACCTACTTCCAGAACGAAGCTCAACTTGAAAAATCTAGGCTGCTGTCTGACAGGTTC | |
| | TCTGCTGAAAGGCCTAAAGGATCTTTTAGCACCCTGGAAATTCAAAGGACCGAACAAGGCGAT | |
| | AGCGCTATGTATTTATGTGCTTCTTCTCCCGGAACCGTGTACAACGAACAATTTTTTGGCCCT | |
| | GGAACCAGACTTACCGTGCTTGAGGACCTGAAAAATGTTTTTCCCCCCGAGGTTGCTGTGTTT | |
| | GAACCTTCTGAAGCTGAAATCTCTCATACCCAGAAGGCCACACTTGTTTGTCTTGCCACAGGA | |
| | TTCTATCCTGACCATGTGGAACTGTCTTGGTGGGTTAATGGCAAGGAAGTTCACTCTGGAGTG | |
| | TCTACAGATCCTCAGCCTTTAAAAGAACAGCCCGCCTTGAATGATTCTAGGTACTGTCTTAGC | |
| | TCTAGGCTTAGGGTGAGCGCTACCTTTTGGCAAAATCCTAGGAACCATTTTAGGTGCCAGGTG | |
| | CAATTCTACGGCCTTAGCGAAAATGATGAGTGGACACAAGATAGGGCCAAACCTGTTACACAA | |
| | ATTGTTTCTGCTGAAGCTTGGGGAAGAGCCGATTGTGGCTTTACAAGCGAAAGCTATCAACAA | |
| | GGCGTTCTTAGCGCCACCATCCTGTATGAGATCCTTCTTGGAAAAGCTACCTTGTATGCCGTG | |
| | TTAGTTTCTGCCCTGGTGTTGATGGCTATGGTGAAGAGAAAGGATAGCAGAGGC | |
| 332 | ATGGGCACCAGCTTACTTTGTTGGATGGCCTTATGTTTACTGGGAGCTGATCACGCTGATACA | TCR L Vβ |
| | GGAGTTAGCCAAGATCCTAGGCATAAGATCACCAAGAGGGGCCAGAATGTGACATTCAGGTGT | (nt) codon |
| | GATCCTATCTCTGAACACAACAGGCTTTATTGGTATAGGCAAACCCTGGGACAGGGACCTGAA | optimized |
| | TTTCTGACATACTTCCAGAATGAGGCTCAACTGGAGAAATCTAGACTGCTGTCTGATAGGTTC | |
| | TCTGCTGAGAGGCCTAAGGGATCTTTTAGCACATTGGAAATCCAAAGGACCGAACAAGGCGAC | |
| | AGCGCCATGTACTTATGTGCTTCTTCTTTAGGAGTGCTTGGCATTGGCTACACATTCGGATCT | |
| | GGAACCAGGTTAACAGTTGTGGAGGACCTGAATAAAGTGTTTCCTCCTGAGGTGGCTGTTTTT | |
| | GAGCCCTCTGAGGCTGAAATTTCTCATACCCAAAAAGCCACACTGGTTTGCCTGGCTACAGGA | |
| | TTTTTTCCTGATCATGTGGAGTTAAGCTGGTGGGTGAACGGAAAAGAAGTTCATTCTGGAGTT | |
| | TCTACCGATCCCCAGCCTCTGAAAGAACAACCTGCTCTGAATGACTCTAGATACTGTCTGAGC | |
| | TCTAGGCTTAGAGTGAGCGCTACCTTTTGGCAAAATCCCAGAAACCACTTTAGGTGCCAAGTG | |
| | CAGTTCTACGGCCTTTCTGAGAATGATGAGTGGACACAAGATAGGGCCAAACCTGTGACACAA | |
| | ATTGTTTCTGCTGAAGCTTGGGGAAGAGCTGACTGTGGATTTACCAGCGTTTCTTATCAACAG | |
| | GGCGTTCTTAGCGCTACCATCCTTTACGAGATTTTACTGGGCAAAGCCACACTGTATGCTGTT | |
| | TTAGTGAGCGCTCTTGTTCTGATGGCCATGGTGAAGAGAAAGGACTTC | |
| 333 | ATGGGCACCTCTTTGTTATGCTGGATGGCCCTGTGTTTATTAGGAGCTGATCATGCTGACACA | TCR M Vβ |
| | GGAGTTAGCCAAGATCCTAGACACAAAATCACCAAGAGGGGCCAGAACGTTACATTCAGGTGT | (nt) codon |
| | GATCCCATTTCTGAACATAACAGGCTGTATTGGTATAGGCAAACCCTTGGCCAAGGCCCTGAA | optimized |
| | TTTCTGACATACTTCCAGAATGAGGCTCAACTTGAGAAATCTAGACTGCTGTCTGATAGGTTC | |
| | TCTGCTGAGAGGCCTAAAGGATCTTTCAGCACCTTGGAGATCCAAAGGACAGAACAGGGAGAT | |
| | TCTGCCATGTATCTGTGTGCCAGCTCTTTAGTTGCTGGAGAAACACAATACTTCGGACCTGGA | |
| | ACAAGGCTGCTGGTGTTAGAGGACCTGAAAAATGTTTTTCCTCCCGAGGTTGCTGTTTTCGAG | |
| | CCTTCTGAAGCTGAAATTAGCCATACCCAGAAGGCCACACTTGTTTGTCTTGCCACAGGCTTT | |
| | TATCCTGATCACGTGGAGTTGTCTTGGTGGGTTAATGGCAAGGAAGTTCATAGCGGAGTTTCT | |
| | ACCGATCCTCAGCCTTTAAAAGAACAACCCGCTCTGAACGACAGCAGATATTGCTTAAGCTCT | |
| | AGGCTGAGAGTTTCTGCCACCTTTTGGCAAAATCCCAGAAACCATTTCAGGTGCCAGGTTCAG | |
| | TTCTACGGATTATCTGAGAATGACGAGTGGACACAGGACAGGGCTAAACCTGTTACACAAATT | |
| | GTTTCTGCCGAAGCTTGGGGAAGAGCTGACTGTGGATTTACATCTGAATCTTACCAACAGGGA | |
| | GTGCTGAGCGCCACCATCCTGTATGAAATCTTACTTGGAAAAGCCACCTTATATGCCGTTCTT | |
| | GTGTCTGCTTTAGTGCTGATGGCCATGGTGAAGAGGAAAGATAGCAGAGGC | |
| 334 | ATGGGCACAAGCCTGCTTTGTTGGATGGCTCTTTGTTTATTAGGCGCTGATCATGCTGATACA | TCR N Vβ |
| | GGAGTGAGCCAAGATCCTAGGCATAAGATCACAAAGAGGGGCCAGAATGTGACATTCAGGTGT | (nt) codon |
| | GATCCCATCTCTGAACATAATAGGCTGTATTGGTACAGGCAAACCCTGGGACAGGGACCTGAG | optimized |
| | TTTTTAACATACTTCCAGAACGAGGCTCAACTGGAGAAATCTAGGCTGCTTTCTGACAGGTTT | |
| | TCTGCTGAGAGGCCCAAAGGCTCTTTTTCTACCCTGGAAATTCAGAGGACAGAACAGGGAGAT | |
| | TCTGCCATGTATCTGTGTGCTAGCTCTGAGACAACCCTTTCTGAGCAATTTTTCGGACCTGGC | |
| | ACAAGACTGACCGTGTTGGAAGATCTGAAGAACGTTTTTCCTCCCGAAGTTGCCGTGTTTGAA | |
| | CCTTCTGAAGCCGAAATTTCTCACACCCAAAAGGCCACCCTTGTTTGTTTGGCTACAGGCTTT | |
| | TACCCTGATCATGTTGAACTTAGCTGGTGGGTGAACGGCAAAGAAGTGCATTCTGGAGTTTCT | |
| | ACAGATCCTCAACCCCTGAAGGAACAACCTGCCTTAAACGACTCTAGGTACTGTCTGTCTAGC | |
| | AGACTGAGAGTTTCTGCCACATTTTGGCAAAACCCTAGGAACCACTTCAGGTGCCAAGTGCAA | |
| | TTCTATGGCTTGAGCGAAAATGATGAATGGACCCAAGACAGAGCTAAGCCTGTGACCCAAATT | |
| | GTTTCTGCTGAAGCTTGGGGAAGAGCTGATTGTGGCTTTACAAGCGAATCTTACCAACAGGGC | |
| | GTTCTGTCTGCCACCATTCTGTACGAAATCTTGCTTGGAAAAGCTACCTTGTATGCTGTGTTA | |
| | GTGTCTGCCCTGGTGTTGATGGCTATGGTGAAGAGAAAAGATAGCAGAGGC | |
| 335 | ATGGGCACATCTCTGCTTTGTTGGATGGCTTTATGTCTGTTAGGCGCTGATCACGCCGATACA | TCR O Vβ |
| | GGAGTTTCTCAAGATCCTAGACACAAGATCACCAAGAGGGGCCAGAACGTTACATTCAGGTGT | (nt) codon |
| | GATCCTATTTCTGAGCATAATAGGCTTTATTGGTACAGGCAGACACTGGGACAAGGCCCTGAA | optimized |
| | TTTCTGACATACTTCCAAAACGAGGCTCAATTAGAAAAGTCTAGGCTGTTGTCTGATAGGTTC | |
| | AGCGCCGAAAGGCCTAAAGGATCTTTCTCTACCCTTGAGATCCAAAGGACAGAACAAGGAGAC | |
| | AGCGCCATGTATTTATGCGCTAGCAGCTTAACAACATTGGATACCCAGTATTTTGGCCCTGGA | |
| | ACCAGACTGACAGTGCTTGAAGATCTGAAAAACGTGTTTCCTCCTGAAGTGGCCGTGTTTGAA | |
| | CCTTCTGAAGCTGAGATTAGCCATACCCAGAAAGCTACATTAGTTTGCTTGGCCACCGGCTTT | |
| | TATCCCGATCATGTTGAATTAAGCTGGTGGGTTAACGGCAAAGAAGTGCATTCTGGAGTTTCT | |
| | ACAGATCCCCAACCTCTTAAGGAGCAACCTGCTTTGAATGACAGCAGGTATTGTCTTTCTAGC | |
| | AGGCTGAGGGTTAGCGCTACATTTTGGCAGAATCCTAGGAACCATTTCAGGTGCCAAGTGCAG | |
| | TTCTATGGCCTTAGCGAGAATGATGAATGGACACAGGACAGAGCTAAACCTGTTACACAAATT | |
| | GTGTCTGCCGAAGCTTGGGGAAGAGCTGATTGTGGCTTTACATCTGAAAGCTACCAACAAGGA | |
| | GTGCTTAGCGCCACCATCCTGTATGAGATCCTTTTAGGAAAGGCTACCTTATATGCCGTGCTT | |
| | GTGTCTGCTCTTGTTCTGATGGCTATGGTGAAGAGGAAAGACAGCAGAGGC | |
| 336 | ATGGGAACATCTCTGCTTTGTTGGATGGCTCTTTGTCTGTTAGGCGCTGATCACGCTGATACA | TCR P Vβ |
| | GGAGTTTCTCAAGATCCCAGACACAAGATCACCAAGAGGGGCCAGAATGTTACATTCAGGTGT | (nt) codon |
| | GATCCCATCTCTGAACACAATAGACTTTATTGGTACAGGCAGACCCTGGGACAAGGCCCTGAG | optimized |
| | TTTCTTACATATTTTCAGAACGAGGCTCAGCTTGAAAAATCTAGGTTGCTGTCTGATAGGTTC | |
| | AGCGCTGAGAGGCCTAAAGGATCTTTCTCTACCTTGGAGATCCAAAGAACAGAACAAGGCGAT | |
| | TCTGCTATGTACCTTTGTGCTAGCCTTACCGGCACAGTGTACAACGAGCAATTTTTTGGACCT | |
| | GGAACAAGACTGACCGTGCTGGAAGATTTGAAAAACGTTTTCCCTCCCGAGGTTGCTGTGTTT | |
| | GAGCCTTCTGAAGCTGAAATTAGCCATACCCAGAAGGCTACCCTGGTTTGTTTGGCTACAGGC | |
| | TTTTATCCTGACCATGTTGAGCTGAGCTGGTGGGTTAATGGAAAGGAGGTTCATTCTGGAGTT | |
| | TCTACAGACCCTCAGCCTCTTAAAGAGCAACCCGCTCTGAATGACTCTAGATACTGCTTGTCT | |
| | TCTAGGCTTAGGGTTTCTGCCACATTTTGGCAGAATCCTAGGAATCACTTCAGGTGCCAAGTG | |
| | CAGTTCTATGGACTGTCTGAAAATGATGAGTGGACCCAGGATAGAGCCAAACCTGTTACACAA | |
| | ATCGTTAGCGCTGAAGCTTGGGGAAGAGCTGATTGTGGCTTTACATCTGAGAGCTATCAGCAA | |
| | GGAGTGTTATCTGCCACCATCCTGTACGAGATCCTTCTTGGAAAAGCCACATTGTATGCCGTG | |
| | CTGGTTTCTGCTCTGGTTTTGATGGCTATGGTGAAGAGAAAGGACAGCAGAGGC | |
| 337 | ATGGGCACAAGCTTACTTTGTTGGATGGCTTTGTGTCTGTTGGGAGCTGATCATGCTGATACA | TCR Q Vβ |
| | GGAGTTAGCCAAGACCCTAGACACAAGATCACAAAGAGGGGCCAGAATGTGACATTCAGGTGT | (nt) codon |
| | GATCCCATTTCTGAACACAATAGGCTGTACTGGTATAGGCAAACCTTGGGACAAGGCCCTGAG | optimized |
| | TTCTTAACATACTTCCAGAACGAGGCTCAATTAGAAAAGAGCAGACTGCTGTCTGACAGGTTC | |
| | TCTGCTGAAAGGCCTAAAGGATCTTTCAGCACACTGGAGATCCAAAGAACAGAGCAGGGAGAT | |
| | TCTGCCATGTACTTATGTGCCTCTAGCTTAGTTAGGAACGAGAAACTGTTCTTTGGCTCTGGA | |
| | ACCCAGCTGTCTGTGCTTGAAGATCTGAACAAGGTTTTTCCCCCTGAGGTTGCTGTTTTTGAG | |
| | CCTTCTGAGGCTGAGATTTCTCATACCCAAAAAGCTACACTGGTGTGTTTGGCCACAGGCTTT | |
| | TTTCCTGACCACGTTGAACTTTCTTGGTGGGTGAATGGCAAGGAAGTTCACTCTGGAGTTTCT | |
| | ACAGATCCTCAGCCTCTGAAGGAACAACCTGCTCTGAACGATAGCAGATACTGTCTTAGCAGC | |
| | AGACTGAGGGTTTCTGCTACCTTTTGGCAAAATCCTAGGAACCACTTCAGATGCCAGGTGCAA | |
| | TTCTACGGCCTTTCTGAAAATGACGAATGGACCCAAGATAGGGCCAAACCTGTTACACAGATT | |
| | GTTTCTGCTGAAGCTTGGGGAAGAGCTGATTGTGGCTTCACATCTGTTAGCTATCAGCAAGGC | |
| | GTTCTTTCTGCCACCATCCTGTACGAAATCCTTCTTGGAAAAGCCACCCTGTATGCTGTTCTG | |
| | GTTTCTGCCCTTGTTTTGATGGCTATGGTGAAGAGAAAGGACTTC | |
| 338 | ATGGGCACCTCTCTTTTATGTTGGATGGCCCTTTGCTTACTTGGAGCTGATCATGCTGATACA | TCR R Vβ |
| | GGAGTGTCTCAAGATCCTAGGCACAAGATCACCAAAAGGGGCCAGAATGTTACATTCAGGTGT | (nt) codon |
| | GATCCCATCTCTGAGCATAACAGACTTTATTGGTACAGGCAGACATTAGGCCAGGGCCCTGAA | optimized |
| | TTCCTGACATACTTTCAAAACGAGGCTCAACTTGAGAAGTCTAGACTTCTGTCTGATAGGTTC | |
| | AGCGCTGAAAGGCCTAAGGGATCTTTCAGCACACTTGAGATCCAAAGAACCGAGCAAGGAGAC | |
| | TCTGCTATGTATTTATGCGCCAGCTCTCCCTTAAAGGGCAGCAATTATGGATATACCTTCGGA | |
| | TCTGGCACCAGGTTAACCGTTGTGGAGGACTTGAATAAAGTGTTCCCTCCTGAGGTGGCTGTT | |
| | TTTGAACCTAGCGAAGCTGAAATTAGCCATACCCAAAAGGCTACACTGGTGTGTCTGGCTACA | |
| | GGCTTTTTTCCTGATCATGTGGAACTTAGCTGGTGGGTGAACGGAAAAGAAGTGCATTCTGGA | |
| | GTTTCTACAGATCCCCAACCCCTTAAAGAACAGCCTGCTCTGAACGACTCTAGATACTGCTTA | |
| | AGCAGCAGATTGAGGGTTTCTGCCACCTTTTGGCAAAATCCCAGGAATCACTTCAGGTGTCAA | |
| | GTGCAGTTCTACGGCTTGAGCGAAAATGATGAGTGGACACAAGATAGGGCTAAACCTGTGACA | |
| | CAAATTGTTTCTGCCGAAGCTTGGGGAAGAGCTGATTGTGGCTTTACATCTGTGAGCTATCAG | |
| | CAAGGAGTGCTGTCTGCCACAATCCTGTACGAAATCCTTCTTGGAAAAGCCACCTTATATGCT | |
| | GTGCTGGTGTCTGCCCTTGTTTTGATGGCTATGGTGAAGAGAAAGGACTTC | |
| 339 | ATGGGCACCAGCTTACTGTGTTGGATGGCTCTTTGTTTACTTGGAGCTGATCACGCCGATACA | TCR S Vβ |
| | GGAGTTAGCCAAGATCCTAGGCATAAGATCACAAAGAGGGGCCAGAACGTTACATTCAGGTGT | (nt) codon |
| | GATCCCATCTCTGAACATAACAGGCTTTATTGGTATAGGCAGACCTTAGGACAGGGCCCTGAA | optimized |
| | TTCCTGACATACTTCCAAAACGAAGCTCAGCTTGAGAAATCTAGGCTTCTGTCTGATAGATTT | |
| | TCTGCCGAGAGGCCCAAGGGATCTTTCTCTACCTTAGAAATTCAAAGGACAGAACAAGGAGAT | |
| | AGCGCTATGTATCTGTGTGCTTCTTCTCCTGGCACCGTTTATAATGAGCAGTTTTTCGGACCT | |
| | GGAACAAGGCTGACCGTGTTGGAAGACTTGAAAAATGTTTTCCCTCCCGAAGTGGCTGTTTTT | |
| | GAGCCTTCTGAAGCTGAGATCTCTCATACCCAAAAAGCCACACTGGTTTGCTTAGCCACAGGC | |
| | TTCTACCCTGATCATGTGGAATTGTCTTGGTGGGTTAATGGCAAGGAAGTTCATAGCGGAGTT | |
| | TCTACAGATCCCCAACCCCTTAAAGAGCAACCTGCCTTGAATGATTCTAGGTACTGCTTAAGC | |
| | AGCAGACTTAGGGTGTCTGCCACATTTTGGCAGAATCCCAGAAACCATTTCAGGTGCCAAGTG | |
| | CAGTTTTATGGCCTGTCTGAAAATGATGAGTGGACACAAGATAGAGCCAAACCTGTGACACAA | |
| | ATTGTTTCTGCTGAAGCTTGGGGAAGAGCCGATTGTGGATTTACCAGCGAAAGCTATCAACAA | |
| | GGCGTTCTGTCTGCCACCATCCTGTATGAAATCTTACTTGGAAAGGCCACCTTGTATGCTGTG | |
| | TTAGTGTCTGCTCTGGTTTTGATGGCTATGGTGAAGAGAAAGGACAGCAGAGGC | |
| 340 | ATGGGAACATCTCTGTTGTGTTGGATGGCCCTGTGTTTACTTGGAGCTGATCATGCTGATACA | TCR T Vβ |
| | GGAGTTAGCCAAGACCCCAGACACAAGATTACAAAGAGGGGCCAGAATGTGACATTCAGGTGT | (nt) codon |
| | GACCCTATCTCTGAACACAATAGGCTGTATTGGTATAGGCAAACACTGGGACAGGGCCCTGAG | optimized |
| | TTTCTTACATACTTCCAGAATGAAGCCCAACTTGAGAAGTCTAGGCTGTTGTCTGACAGGTTC | |
| | TCTGCTGAAAGGCCTAAAGGATCTTTCAGCACCCTTGAGATTCAGAGGACAGAACAAGGAGAT | |
| | AGCGCCATGTATCTGTGTGCTTCTTCTCAACTTGCCGGAGTGATTGAACAATTTTTTGGACCT | |
| | GGCACAAGGCTTACCGTGCTTGAGGATTTGAAAAACGTTTTCCCTCCCGAGGTTGCTGTGTTT | |
| | GAACCTTCTGAAGCTGAGATCTCTCATACACAGAAGGCTACATTAGTGTGCCTTGCCACAGGC | |
| | TTTTATCCTGATCATGTTGAACTTAGCTGGTGGGTGAACGGCAAAGAAGTTCATTCTGGAGTT | |
| | AGCACAGATCCTCAACCTCTGAAGGAACAACCTGCTCTGAATGATTCTAGGTACTGCCTGTCT | |
| | TCTAGACTGAGGGTTTCTGCTACCTTTTGGCAGAATCCCAGAAACCACTTCAGATGCCAAGTG | |
| | CAGTTCTATGGACTGAGCGAGAACGATGAATGGACACAGGATAGAGCCAAACCTGTTACACAA | |
| | ATTGTTAGCGCTGAAGCTTGGGGAAGGGCTGATTGTGGATTTACATCTGAATCTTACCAGCAG | |
| | GGCGTTCTGAGCGCCACCATTCTGTATGAAATTTTGCTTGGAAAGGCTACCTTGTATGCCGTT | |
| | CTTGTTTCTGCTCTGGTTTTGATGGCCATGGTGAAGAGAAAGGACAGCAGAGGC | |
| 341 | MASAPISMLAMLFTLSGLR | TCR A, D, E |
| | | alpha chain |
| | | ss (aa) |
| 342 | METLLGVSLVILWLQLARVN | TCR B, G, R, |
| | | T alpha |
| | | chain ss (aa) |
| 343 | METLLGLLILWLQLQWVSS | TCR C, I, L, |
| | | M alpha |
| | | chain ss (aa) |
| 344 | MSIRAVFIFLWLQLDLVN | TCR F, H, O, |
| | | Q alpha |
| | | chain ss (aa) |
| 345 | MKSLRVLLVILWLQLSWVWSQ | TCR J alpha |
| | | chain ss (aa) |
| 346 | MKLVTSITVLLSLGIMG | TCR K alpha |
| | | chain ss (aa) |
| 347 | MSIRALFIFLWLQLDLVN | TCR N alpha |
| | | chain ss (aa) |
| 348 | MLLLLIPVLGMIFALRDAR | TCR P alpha |
| | | chain ss (aa) |
| 349 | MRLVARVTVFLTFGTII | TCR S alpha |
| | | chain ss (aa) |
| 350 | MGTSLLCWMALCLLGADHA | TCR A-T |
| | | beta chain |
| | | ss (aa) |
| 351 | GCCACGAACTTCTCTCTGTTAAAGCAAGCAGGAGACGTGGAAGAAAACCCCGGTCCC | P2A (nt) |
| 352 | ATNFSLLKQAGDVEENPGP | P2A (aa) |
| 353 | GSG | Linker (aa) |
| 354 | VLHDDLLEA | HA-1 H |
| | | variant |
| | | peptide |
| 355 | VLRDDLLEA | HA-1 R |
| | | variant |
| | | peptide |
| 356 | DKQLDADVSPKPTIFLPSIAETKLQKAGTYLCLLEKFFPDVIKIHWQEKKSNTILGSQEGNTM | TRGC1 (aa)- |
| | KTNDTYMKFSWLTVPEKSLDKEHRCIVRHENNKNGVDQEIIFPPIKTDVITMDPKDNCSKDAN | Uniprot |
| | DTLLLQLTNTSAYYMYLLLLLKSVVYFAIITCCLLRRTAFCCNGEKS | POCF51 |
| 357 | DKQLDADVSPKPTIFLPSIAETKLQKAGTYLCLLEKFFPDIIKIHWQEKKSNTILGSQEGNTM | TRGC2 (aa)- |
| | KTNDTYMKFSWLTVPEESLDKEHRCIVRHENNKNGIDQEIIFPPIKTDVTTVDPKYNYSKDAN | Uniprot |
| | DVITMDPKDNWSKDANDTLLLQLTNTSAYYTYLLLLLKSVVYFAIITCCLLRRTAFCCNGEKS | P03986 |
| 358 | SQPHTKPSVFVMKNGTNVACLVKEFYPKDIRINLVSSKKITEFDPAIVISPSGKYNAVKLGKY | TRDC (aa)- |
| | EDSNSVTCSVQHDNKTVHSTDFEVKTDSTDHVKPKETENTKQPSKSCHKPKAIVHTEKVNMMS | Uniprot |
| | LTVLGLRMLFAKTVAVNFLLTAKLFFL | B7Z8K6 |
| 359 | AGHSSGTYKYI | TCR U Vα |
| | | CDR-3 |
| 360 | QQVMQIPQYQHVQEGEDFTTYCNSSTTLSNIQWYKQRPGGHPVFLIQLVKSGEVKKQKRLTFQ | TCR U Vα |
| | FGEAKKNSSLHITATQTTDVGTYFCAGHSSGTYKYIFGTGTRLKVLAN | (aa) |
| 361 | MLLITSMLVLWMQLSQVNGQQVMQIPQYQHVQEGEDFTTYCNSSTTLSNIQWYKQRPGGHPVF | TCR U Vα + |
| | LIQLVKSGEVKKQKRLTFQFGEAKKNSSLHITATQTTDVGTYFCAGHSSGTYKYIFGTGTRLK | ss (aa) |
| | VLAN | |
| 362 | MLLITSMLVLWMQLSQVNGQQVMQIPQYQHVQEGEDFTTYCNSSTTLSNIQWYKQRPGGHPVF | TCR U Vα + |
| | LIQLVKSGEVKKQKRLTFQFGEAKKNSSLHITATQTTDVGTYFCAGHSSGTYKYIFGTGTRLK | Cα (aa) |
| | VLANIQNPDPAVYQLRDSKSSDKSVCLFTDFDSQTNVSQSKDSDVYITDKTVLDMRSMDFKSN | |
| | SAVAWSNKSDFACANAFNNSIIPEDTFFPSPESSCDVKLVEKSFETDTNLNFQNLSVIGFRIL | |
| | LLKVAGFNLLMTLRLWSS | |
| 363 | ASSPGTVLNEQF | TCR U Vβ |
| | | CDR-3 |
| 364 | DTGVSQDPRHKITKRGQNVTFRCDPISEHNRLYWYRQTLGQGPEFLTYFQNEAQLEKSRLLSD | TCR U Vβ |
| | RFSAERPKGSFSTLEIQRTEQGDSAMYLCASSPGTVLNEQFFGPGTRLTVLE | (aa) |
| 365 | MGTSLLCWMALCLLGADHADTGVSQDPRHKITKRGQNVTFRCDPISEHNRLYWYRQTLGQGPE | TCR U Vβ + |
| | FLTYFQNEAQLEKSRLLSDRFSAERPKGSFSTLEIQRTEQGDSAMYLCASSPGTVLNEQFFGP | ss (aa) |
| | GTRLTVLE | |
| 366 | MGTSLLCWMALCLLGADHADTGVSQDPRHKITKRGQNVTFRCDPISEHNRLYWYRQTLGQGPE | TCR U Vβ + |
| | FLTYFQNEAQLEKSRLLSDRESAERPKGSFSTLEIQRTEQGDSAMYLCASSPGTVLNEQFFGP | Cß (aa) |
| | GTRLTVLEDLKNVFPPEVAVFEPSEAEISHTQKATLVCLATGFYPDHVELSWWVNGKEVHSGV | |
| | STDPQPLKEQPALNDSRYCLSSRLRVSATFWQNPRNHFRCQVQFYGLSENDEWTQDRAKPVTQ | |
| | IVSAEAWGRADCGFTSESYQQGVLSATILYEILLGKATLYAVLVSALVLMAMVKRKDSRG | |
| 367 | MLLITSMLVLWMQLSQVNGQQVMQIPQYQHVQEGEDFTTYCNSSTTLSNIQWYKQRPGGHPVF | TCR U |
| | LIQLVKSGEVKKQKRLTFQFGEAKKNSSLHITATQTTDVGTYFCAGHSSGTYKYIFGTGTRLK | protein |
| | VLANIQNPDPAVYQLRDSKSSDKSVCLFTDFDSQTNVSQSKDSDVYITDKTVLDMRSMDFKSN | |
| | SAVAWSNKSDFACANAFNNSIIPEDTFFPSPESSCDVKLVEKSFETDTNLNFQNLSVIGFRIL | |
| | LLKVAGFNLLMTLRLWSSGSGATNFSLLKQAGDVEENPGPMGTSLLCWMALCLLGADHADTGV | |
| | SQDPRHKITKRGQNVTFRCDPISEHNRLYWYRQTLGQGPEFLTYFQNEAQLEKSRLLSDRESA | |
| | ERPKGSFSTLEIQRTEQGDSAMYLCASSPGTVLNEQFFGPGTRLTVLEDLKNVFPPEVAVFEP | |
| | SEAEISHTQKATLVCLATGFYPDHVELSWWVNGKEVHSGVSTDPQPLKEQPALNDSRYCLSSR | |
| | LRVSATFWQNPRNHERCQVQFYGLSENDEWTQDRAKPVTQIVSAEAWGRADCGFTSESYQQGV | |
| | LSATILYEILLGKATLYAVLVSALVLMAMVKRKDSRG | |
| 368 | ATGCTACTCATCACATCAATGTTGGTCTTATGGATGCAATTGTCACAGGTGAATGGACAACAG | TCR U (nt) |
| | GTAATGCAAATTCCTCAGTACCAGCATGTACAAGAAGGAGAGGACTTCACCACGTACTGCAAT | |
| | TCCTCAACTACTTTAAGCAATATACAGTGGTATAAGCAAAGGCCTGGTGGACATCCCGTTTTT | |
| | TTGATACAGTTAGTGAAGAGTGGAGAAGTGAAGAAGCAGAAAAGACTGACATTTCAGTTTGGA | |
| | GAAGCAAAAAAGAACAGCTCCCTGCACATCACAGCCACCCAGACTACAGATGTAGGAACCTAC | |
| | TTCTGTGCAGGGCACTCCTCAGGAACCTACAAATACATCTTTGGAACAGGCACCAGGCTGAAG | |
| | GTTTTAGCAAATATCCAGAACCCTGACCCTGCCGTGTACCAGCTGAGAGACTCTAAATCCAGT | |
| | GACAAGTCTGTCTGCCTATTCACCGATTTTGATTCTCAAACAAATGTGTCACAAAGTAAGGAT | |
| | TCTGATGTGTATATCACAGACAAAACTGTGCTAGACATGAGGTCTATGGACTTCAAGAGCAAC | |
| | AGTGCTGTGGCCTGGAGCAACAAATCTGACTTTGCATGTGCAAACGCCTTCAACAACAGCATT | |
| | ATTCCAGAAGACACCTTCTTCCCCAGCCCAGAAAGTTCCTGTGATGTCAAGCTGGTCGAGAAA | |
| | AGCTTTGAAACAGATACGAACCTAAACTTTCAAAACCTGTCAGTGATTGGGTTCCGAATCCTC | |
| | CTCCTGAAAGTGGCCGGGTTTAATCTGCTCATGACGCTGCGGCTGTGGTCCAGCGGCTCCGGA | |
| | GCCACGAACTTCTCTCTGTTAAAGCAAGCAGGAGACGTGGAAGAAAACCCCGGTCCCATGGGC | |
| | ACCAGCCTCCTCTGCTGGATGGCCCTGTGTCTCCTGGGGGCAGATCACGCAGATACTGGAGTC | |
| | TCCCAGGACCCCAGACACAAGATCACAAAGAGGGGACAGAATGTAACTTTCAGGTGTGATCCA | |
| | ATTTCTGAACACAACCGCCTTTATTGGTACCGACAGACCCTGGGGCAGGGCCCAGAGTTTCTG | |
| | ACTTACTTCCAGAATGAAGCTCAACTAGAAAAATCAAGGCTGCTCAGTGATCGGTTCTCTGCA | |
| | GAGAGGCCTAAGGGATCTTTCTCCACCTTGGAGATCCAGCGCACAGAGCAGGGGGACTCGGCC | |
| | ATGTATCTCTGTGCCAGCAGCCCCGGGACAGTTCTCAATGAGCAGTTCTTCGGGCCAGGGACA | |
| | CGGCTCACCGTGCTAGAGGACCTGAAAAACGTGTTCCCACCCGAGGTCGCTGTGTTTGAGCCA | |
| | TCAGAAGCAGAGATCTCCCACACCCAAAAGGCCACACTGGTGTGCCTGGCCACAGGCTTCTAC | |
| | CCCGACCACGTGGAGCTGAGCTGGTGGGTGAATGGGAAGGAGGTGCACAGTGGGGTCAGCACA | |
| | GACCCGCAGCCCCTCAAGGAGCAGCCCGCCCTCAATGACTCCAGATACTGCCTGAGCAGCCGC | |
| | CTGAGGGTCTCGGCCACCTTCTGGCAGAACCCCCGCAACCACTTCCGCTGTCAAGTCCAGTTC | |
| | TACGGGCTCTCGGAGAATGACGAGTGGACCCAGGATAGGGCCAAACCTGTCACCCAGATCGTC | |
| | AGCGCCGAGGCCTGGGGTAGAGCAGACTGTGGCTTCACCTCCGAGTCTTACCAGCAAGGGGTC | |
| | CTGTCTGCCACCATCCTCTATGAGATCTTGCTAGGGAAGGCCACCTTGTATGCCGTGCTGGTC | |
| | AGTGCCCTCGTGCTGATGGCCATGGTCAAGAGAAAGGATTCCAGAGGCTGA | |
| | α chain nucleotides: 1-819 | |
| | P2A nucleotides: 820-876 | |
| | ß chain nucleotides: 877-1815 | |
| 369 | ALYSGAGSYQLT | TCR V Vα |
| | | CDR-3 |
| 370 | MAQTVTQSQPEMSVQEAETVTLSCTYDTSENNYYLFWYKQPPSRQMILVIRQEAYKQQNATEN | TCR V Vα |
| | RFSVNFQKAAKSFSLKISDSQLGDTAMYFCALYSGAGSYQLTFGKGTKLSVIPN | (aa) |
| 371 | MTRVSLLWAVVVSTCLESGMAQTVTQSQPEMSVQEAETVTLSCTYDTSENNYYLFWYKQPPSR | TCR V Vα + |
| | QMILVIRQEAYKQQNATENRFSVNFQKAAKSFSLKISDSQLGDTAMYFCALYSGAGSYQLTFG | ss (aa) |
| | KGTKLSVIPN | |
| 372 | MTRVSLLWAVVVSTCLESGMAQTVTQSQPEMSVQEAETVTLSCTYDTSENNYYLFWYKOPPSR | TCR V Vα + |
| | QMILVIRQEAYKQQNATENRFSVNFQKAAKSFSLKISDSQLGDTAMYFCALYSGAGSYQLTFG | Cα (aa) |
| | KGTKLSVIPNIQNPDPAVYQLRDSKSSDKSVCLFTDFDSQTNVSQSKDSDVYITDKTVLDMRS | |
| | MDFKSNSAVAWSNKSDFACANAENNSIIPEDTFFPSPESSCDVKLVEKSFETDTNLNFQNLSV | |
| | IGFRILLLKVAGFNLLMTLRLWSS | |
| 373 | ASSLAAGMNTEAF | TCR V Vβ |
| | | CDR-3 |
| 374 | DTGVSQDPRHKITKRGQNVTFRCDPISEHNRLYWYRQTLGQGPEFLTYFQNEAQLEKSRLLSD | TCR V Vβ |
| | RFSAERPKGSFSTLEIQRTEQGDSAMYLCASSLAAGMNTEAFFGQGTRLTVVE | (aa) |
| 375 | MGTSLLCWMALCLLGADHADTGVSQDPRHKITKRGONVTFRCDPISEHNRLYWYRQTLGQGPE | TCR V Vβ + |
| | FLTYFQNEAQLEKSRLLSDRFSAERPKGSFSTLEIQRTEQGDSAMYLCASSLAAGMNTEAFFG | ss (aa) |
| | QGTRLTVVE | |
| 376 | MGTSLLCWMALCLLGADHADTGVSQDPRHKITKRGQNVTFRCDPISEHNRLYWYROTLGQGPE | TCR V Vβ + |
| | FLTYFQNEAQLEKSRLLSDRFSAERPKGSFSTLEIQRTEQGDSAMYLCASSLAAGMNTEAFFG | Cß (aa) |
| | QGTRLTVVEDLNKVFPPEVAVFEPSEAEISHTQKATLVCLATGFFPDHVELSWWVNGKEVHSG | |
| | VSTDPQPLKEQPALNDSRYCLSSRLRVSATFWQNPRNHFRCQVQFYGLSENDEWTQDRAKPVT | |
| | QIVSAEAWGRADCGFTSVSYQQGVLSATILYEILLGKATLYAVLVSALVLMAMVKRKDF | |
| 377 | MTRVSLLWAVVVSTCLESGMAQTVTQSQPEMSVQEAETVTLSCTYDTSENNYYLFWYKQPPSR | TCR V |
| | QMILVIRQEAYKQQNATENRFSVNFQKAAKSFSLKISDSQLGDTAMYFCALYSGAGSYQLTFG | protein |
| | KGTKLSVIPNIQNPDPAVYQLRDSKSSDKSVCLFTDFDSQTNVSQSKDSDVYITDKTVLDMRS | |
| | MDFKSNSAVAWSNKSDFACANAFNNSIIPEDTFFPSPESSCDVKLVEKSFETDTNLNFQNLSV | |
| | IGFRILLLKVAGFNLLMTLRLWSSGSGATNFSLLKQAGDVEENPGPMGTSLLCWMALCLLGAD | |
| | HADTGVSQDPRHKITKRGQNVTFRCDPISEHNRLYWYRQTLGQGPEFLTYFQNEAQLEKSRLL | |
| | SDRFSAERPKGSFSTLEIQRTEQGDSAMYLCASSLAAGMNTEAFFGQGTRLTVVEDLNKVFPP | |
| | EVAVFEPSEAEISHTQKATLVCLATGFFPDHVELSWWVNGKEVHSGVSTDPQPLKEQPALNDS | |
| | RYCLSSRLRVSATFWQNPRNHFRCQVQFYGLSENDEWTQDRAKPVTQIVSAEAWGRADCGFTS | |
| | VSYQQGVLSATILYEILLGKATLYAVLVSALVLMAMVKRKDF | |
| 378 | ATGACACGAGTTAGCTTGCTGTGGGCAGTCGTGGTCTCCACCTGTCTTGAATCCGGCATGGCC | TCR V (nt) |
| | CAGACAGTCACTCAGTCTCAACCAGAGATGTCTGTGCAGGAGGCAGAGACTGTGACCCTGAGT | |
| | TGCACATATGACACCAGTGAGAATAATTATTATTTGTTCTGGTACAAGCAGCCTCCCAGCAGG | |
| | CAGATGATTCTCGTTATTCGCCAAGAAGCTTATAAGCAACAGAATGCAACGGAGAATCGTTTC | |
| | TCTGTGAACTTCCAGAAAGCAGCCAAATCCTTCAGTCTCAAGATCTCAGACTCACAGCTGGGG | |
| | GACACTGCGATGTATTTCTGTGCTTTATACTCTGGGGCTGGGAGTTACCAACTCACTTTCGGG | |
| | AAGGGGACCAAACTCTCGGTCATACCAAATATCCAGAACCCTGACCCTGCCGTGTACCAGCTG | |
| | AGAGACTCTAAATCCAGTGACAAGTCTGTCTGCCTATTCACCGATTTTGATTCTCAAACAAAT | |
| | GTGTCACAAAGTAAGGATTCTGATGTGTATATCACAGACAAAACTGTGCTAGACATGAGGTCT | |
| | ATGGACTTCAAGAGCAACAGTGCTGTGGCCTGGAGCAACAAATCTGACTTTGCATGTGCAAAC | |
| | GCCTTCAACAACAGCATTATTCCAGAAGACACCTTCTTCCCCAGCCCAGAAAGTTCCTGTGAT | |
| | GTCAAGCTGGTCGAGAAAAGCTTTGAAACAGATACGAACCTAAACTTTCAAAACCTGTCAGTG | |
| | ATTGGGTTCCGAATCCTCCTCCTGAAAGTGGCCGGGTTTAATCTGCTCATGACGCTGCGGCTG | |
| | TGGTCCAGCGGCTCCGGAGCCACGAACTTCTCTCTGTTAAAGCAAGCAGGAGACGTGGAAGAA | |
| | AACCCCGGTCCCATGGGCACCAGCCTCCTCTGCTGGATGGCCCTGTGTCTCCTGGGGGCAGAT | |
| | CACGCAGATACTGGAGTCTCCCAGGACCCCAGACACAAGATCACAAAGAGGGGACAGAATGTA | |
| | ACTTTCAGGTGTGATCCAATTTCTGAACACAACCGCCTTTATTGGTACCGACAGACCCTGGGG | |
| | CAGGGCCCAGAGTTTCTGACTTACTTCCAGAATGAAGCTCAACTAGAAAAATCAAGGCTGCTC | |
| | AGTGATCGGTTCTCTGCAGAGAGGCCTAAGGGATCTTTCTCCACCTTGGAGATCCAGCGCACA | |
| | GAGCAGGGGGACTCGGCCATGTATCTCTGTGCCAGCAGCTTAGCGGCAGGGATGAACACTGAA | |
| | GCTTTCTTTGGACAAGGCACCAGACTCACAGTTGTAGAGGACCTGAACAAGGTGTTCCCACCC | |
| | GAGGTCGCTGTGTTTGAGCCATCAGAAGCAGAGATCTCCCACACCCAAAAGGCCACACTGGTG | |
| | TGCCTGGCCACAGGCTTCTTCCCCGACCACGTGGAGCTGAGCTGGTGGGTGAATGGGAAGGAG | |
| | GTGCACAGTGGGGTCAGCACGGACCCGCAGCCCCTCAAGGAGCAGCCCGCCCTCAATGACTCC | |
| | AGATACTGCCTGAGCAGCCGCCTGAGGGTCTCGGCCACCTTCTGGCAGAACCCCCGCAACCAC | |
| | TTCCGCTGTCAAGTCCAGTTCTACGGGCTCTCGGAGAATGACGAGTGGACCCAGGATAGGGCC | |
| | AAACCCGTCACCCAGATCGTCAGCGCCGAGGCCTGGGGTAGAGCAGACTGTGGCTTTACCTCG | |
| | GTGTCCTACCAGCAAGGGGTCCTGTCTGCCACCATCCTCTATGAGATCCTGCTAGGGAAGGCC | |
| | ACCCTGTATGCTGTGCTGGTCAGCGCCCTTGTGTTGATGGCCATGGTCAAGAGAAAGGATTTC | |
| | TGA | |
| | α chain nucleotides: 1-837 | |
| | P2A nucleotides: 838-894 | |
| | ß chain nucleotides: 895-1830 | |
| 379 | CAVRDPTSGTYKYIF | TCR W Vα |
| | | CDR-3 |
| 380 | AQSVAQPEDQVNVAEGNPLTVKCTYSVSGNPYLFWYVQYPNRGLQFLLKYITGDNLVKGSYGF | TCR Vα (aa) |
| | EAEFNKSQTSFHLKKPSALVSDSALYFCAVRDPTSGTYKYIFGTGTRLKVLAN | |
| 381 | MASAPISMLAMLFTLSGLRAQSVAQPEDQVNVAEGNPLTVKCTYSVSGNPYLFWYVQYPNRGL | TCR W Vα + |
| | QFLLKYITGDNLVKGSYGFEAEFNKSQTSFHLKKPSALVSDSALYFCAVRDPTSGTYKYIFGT | ss (aa) |
| | GTRLKVLAN | |
| 382 | MASAPISMLAMLFTLSGLRAQSVAQPEDQVNVAEGNPLTVKCTYSVSGNPYLFWYVQYPNRGL | TCR W Vα + |
| | QFLLKYITGDNLVKGSYGFEAEFNKSQTSFHLKKPSALVSDSALYFCAVRDPTSGTYKYIFGT | Cα (aa) |
| | GTRLKVLANIQNPDPAVYQLRDSKSSDKSVCLFTDFDSQTNVSQSKDSDVYITDKTVLDMRSM | |
| | DFKSNSAVAWSNKSDFACANAFNNSIIPEDTFFPSPESSCDVKLVEKSFETDTNLNFQNLSVI | |
| | GFRILLLKVAGFNLLMTLRLWSS | |
| 383 | CASSLVQGNEQFF | TCR W Vβ |
| | | CDR-3 |
| 384 | DTGVSQDPRHKITKRGQNVTFRCDPISEHNRLYWYRQTLGQGPEFLTYFQNEAQLEKSRLLSD | TCR W Vβ |
| | RFSAERPKGSFSTLEIQRTEQGDSAMYLCASSLVQGNEQFFGPGTRLTVLE | (aa) |
| 385 | MGTSLLCWMALCLLGADHADTGVSQDPRHKITKRGQNVTFRCDPISEHNRLYWYRQTLGQGPE | TCR W Vβ + |
| | FLTYFQNEAQLEKSRLLSDRFSAERPKGSFSTLEIQRTEQGDSAMYLCASSLVQGNEQFFGPG | ss (aa) |
| | TRLTVLE | |
| 386 | MGTSLLCWMALCLLGADHADTGVSQDPRHKITKRGQNVTFRCDPISEHNRLYWYRQTLGQGPE | TCR W Vβ + |
| | FLTYFQNEAQLEKSRLLSDRFSAERPKGSFSTLEIQRTEQGDSAMYLCASSLVQGNEQFFGPG | Cß (aa) |
| | TRLTVLEDLKNVEPPEVAVFEPSEAEISHTQKATLVCLATGFYPDHVELSWWVNGKEVHSGVS | |
| | TDPQPLKEQPALNDSRYCLSSRLRVSATFWQNPRNHFRCQVQFYGLSENDEWTQDRAKPVTQI | |
| | VSAEAWGRADCGFTSESYQQGVLSATILYEILLGKATLYAVLVSALVLMAMVKRKDSRG | |
| 387 | MASAPISMLAMLFTLSGLRAQSVAQPEDQVNVAEGNPLTVKCTYSVSGNPYLFWYVQYPNRGL | TCR W |
| | QFLLKYITGDNLVKGSYGFEAEFNKSQTSFHLKKPSALVSDSALYFCAVRDPTSGTYKYIFGT | protein |
| | GTRLKVLANIQNPDPAVYQLRDSKSSDKSVCLFTDFDSQTNVSQSKDSDVYITDKTVLDMRSM | |
| | DFKSNSAVAWSNKSDFACANAFNNSIIPEDTFFPSPESSCDVKLVEKSFETDTNLNFQNLSVI | |
| | GFRILLLKVAGFNLLMTLRLWSSGSGATNFSLLKQAGDVEENPGPMGTSLLCWMALCLLGADH | |
| | ADTGVSQDPRHKITKRGQNVTFRCDPISEHNRLYWYRQTLGQGPEFLTYFQNEAQLEKSRLLS | |
| | DRFSAERPKGSFSTLEIQRTEQGDSAMYLCASSLVQGNEQFFGPGTRLTVLEDLKNVFPPEVA | |
| | VFEPSEAEISHTQKATLVCLATGFYPDHVELSWWVNGKEVHSGVSTDPQPLKEQPALNDSRYC | |
| | LSSRLRVSATFWQNPRNHFRCQVQFYGLSENDEWTQDRAKPVTQIVSAEAWGRADCGFTSESY | |
| | QQGVLSATILYEILLGKATLYAVLVSALVLMAMVKRKDSRG | |
| 388 | ATGGCCTCTGCACCCATCTCGATGCTTGCGATGCTCTTCACATTGAGTGGGCTGAGAGCTCAG | TCR W (nt) |
| | TCAGTGGCTCAGCCGGAAGATCAGGTCAACGTTGCTGAAGGGAATCCTCTGACTGTGAAATGC | |
| | ACCTATTCAGTCTCTGGAAACCCTTATCTTTTTTGGTATGTTCAATACCCCAACCGAGGCCTC | |
| | CAGTTCCTTCTGAAATACATCACAGGGGATAACCTGGTTAAAGGCAGCTATGGCTTTGAAGCT | |
| | GAATTTAACAAGAGCCAAACCTCCTTCCACCTGAAGAAACCATCTGCCCTTGTGAGCGACTCC | |
| | GCTTTGTACTTCTGTGCTGTGAGAGACCCTACCTCAGGAACCTACAAATACATCTTTGGAACA | |
| | GGCACCAGGCTGAAGGTTTTAGCAAATATCCAGAACCCTGACCCTGCCGTGTACCAGCTGAGA | |
| | GACTCTAAATCCAGTGACAAGTCTGTCTGCCTATTCACCGATTTTGATTCTCAAACAAATGTG | |
| | TCACAAAGTAAGGATTCTGATGTGTATATCACAGACAAAACTGTGCTAGACATGAGGTCTATG | |
| | GACTTCAAGAGCAACAGTGCTGTGGCCTGGAGCAACAAATCTGACTTTGCATGTGCAAACGCC | |
| | TTCAACAACAGCATTATTCCAGAAGACACCTTCTTCCCCAGCCCAGAAAGTTCCTGTGATGTC | |
| | AAGCTGGTCGAGAAAAGCTTTGAAACAGATACGAACCTAAACTTTCAAAACCTGTCAGTGATT | |
| | GGGTTCCGAATCCTCCTCCTGAAAGTGGCCGGGTTTAATCTGCTCATGACGCTGCGGCTGTGG | |
| | TCCAGCGGCTCCGGAGCCACGAACTTCTCTCTGTTAAAGCAAGCAGGAGACGTGGAAGAAAAC | |
| | CCCGGTCCCATGGGCACCAGCCTCCTCTGCTGGATGGCCCTGTGTCTCCTGGGGGCAGATCAC | |
| | GCAGATACTGGAGTCTCCCAGGACCCCAGACACAAGATCACAAAGAGGGGACAGAATGTAACT | |
| | TTCAGGTGTGATCCAATTTCTGAACACAACCGCCTTTATTGGTACCGACAGACCCTGGGGCAG | |
| | GGCCCAGAGTTTCTGACTTACTTCCAGAATGAAGCTCAACTAGAAAAATCAAGGCTGCTCAGT | |
| | GATCGGTTCTCTGCAGAGAGGCCTAAGGGATCTTTCTCCACCTTGGAGATCCAGCGCACAGAG | |
| | CAGGGGGACTCGGCCATGTATCTCTGTGCCAGCAGCTTAGTGCAGGGCAATGAGCAGTTCTTC | |
| | GGGCCAGGGACACGGCTCACCGTGCTAGAGGACCTGAAAAACGTGTTCCCACCCGAGGTCGCT | |
| | GTGTTTGAGCCATCAGAAGCAGAGATCTCCCACACCCAAAAGGCCACACTGGTGTGCCTGGCC | |
| | ACAGGCTTCTACCCCGACCACGTGGAGCTGAGCTGGTGGGTGAATGGGAAGGAGGTGCACAGT | |
| | GGGGTCAGCACAGACCCGCAGCCCCTCAAGGAGCAGCCCGCCCTCAATGACTCCAGATACTGC | |
| | CTGAGCAGCCGCCTGAGGGTCTCGGCCACCTTCTGGCAGAACCCCCGCAACCACTTCCGCTGT | |
| | CAAGTCCAGTTCTACGGGCTCTCGGAGAATGACGAGTGGACCCAGGATAGGGCCAAACCTGTC | |
| | ACCCAGATCGTCAGCGCCGAGGCCTGGGGTAGAGCAGACTGTGGCTTCACCTCCGAGTCTTAC | |
| | CAGCAAGGGGTCCTGTCTGCCACCATCCTCTATGAGATCTTGCTAGGGAAGGCCACCTTGTAT | |
| | GCCGTGCTGGTCAGTGCCCTCGTGCTGATGGCCATGGTCAAGAGAAAGGATTCCAGAGGCTGA | |
| | α chain nucleotides: 1-834 | |
| | P2A nucleotides: 835-891 | |
| | ß chain nucleotides: 892-1827 | |
| 389 | VVLGGAGNMLT | TCR X Vα |
| | | CDR-3 |
| 390 | GENVEQHPSTLSVQEGDSAVIKCTYSDSASNYFPWYKQELGKRPQLIIDIRSNVGEKKDQRIA | TCR X Vα |
| | VTLNKTAKHFSLHITETQPEDSAVYFCVVLGGAGNMLTFGGGTRLMVKPH | (aa) |
| 391 | MTSIRAVFIFLWLQLDLVNGENVEQHPSTLSVQEGDSAVIKCTYSDSASNYFPWYKQELGKRP | TCR X Vα + |
| | QLIIDIRSNVGEKKDQRIAVTLNKTAKHFSLHITETQPEDSAVYFCVVLGGAGNMLTFGGGTR | ss (aa) |
| | LMVKPH | |
| 392 | MTSIRAVFIFLWLQLDLVNGENVEQHPSTLSVQEGDSAVIKCTYSDSASNYFPWYKQELGKRP | TCR X Vα + |
| | QLIIDIRSNVGEKKDQRIAVTLNKTAKHFSLHITETQPEDSAVYFCVVLGGAGNMLTFGGGTR | Cα (aa) |
| | LMVKPHIQNPDPAVYQLRDSKSSDKSVCLFTDFDSQTNVSQSKDSDVYITDKTVLDMRSMDFK | |
| | SNSAVAWSNKSDFACANAFNNSIIPEDTFFPSPESSCDVKLVEKSFETDTNLNFQNLSVIGFR | |
| | ILLLKVAGFNLLMTLRLWSS | |
| 393 | ASSLTVSDGYT | TCR X Vβ |
| | | CDR-3 |
| 394 | DTGVSQDPRHKITKRGQNVTFRCDPISEHNRLYWYRQTLGQGPEFLTYFQNEAQLEKSRLLSD | TCR X Vβ |
| | RFSAERPKGSFSTLEIQRTEQGDSAMYLCASSLTVSDGYTFGSGTRLTVVE | (aa) |
| 395 | MGTSLLCWMALCLLGADHADTGVSQDPRHKITKRGQNVTFRCDPISEHNRLYWYRQTLGQGPE | TCR X Vβ + |
| | FLTYFQNEAQLEKSRLLSDRFSAERPKGSFSTLEIQRTEQGDSAMYLCASSLTVSDGYTFGSG | ss (aa) |
| | TRLTVVE | |
| 396 | MGTSLLCWMALCLLGADHADTGVSQDPRHKITKRGQNVTFRCDPISEHNRLYWYRQTLGQGPE | TCR X Vβ + |
| | FLTYFQNEAQLEKSRLLSDRFSAERPKGSFSTLEIQRTEQGDSAMYLCASSLTVSDGYTFGSG | Cß (aa) |
| | TRLTVVEDLNKVFPPEVAVFEPSEAEISHTQKATLVCLATGFFPDHVELSWWVNGKEVHSGVS | |
| | TDPQPLKEQPALNDSRYCLSSRLRVSATFWQNPRNHFRCQVQFYGLSENDEWTQDRAKPVTQI | |
| | VSAEAWGRADCGFTSVSYQQGVLSATILYEILLGKATLYAVLVSALVLMAMVKRKDF | |
| 397 | MTSIRAVFIFLWLQLDLVNGENVEQHPSTLSVQEGDSAVIKCTYSDSASNYFPWYKQELGKRP | TCR X |
| | QLIIDIRSNVGEKKDQRIAVTLNKTAKHFSLHITETQPEDSAVYFCVVLGGAGNMLTFGGGTR | protein |
| | LMVKPHIQNPDPAVYQLRDSKSSDKSVCLFTDFDSQTNVSQSKDSDVYITDKTVLDMRSMDFK | |
| | SNSAVAWSNKSDFACANAFNNSIIPEDTFFPSPESSCDVKLVEKSFETDTNLNFQNLSVIGER | |
| | ILLLKVAGFNLLMTLRLWSSGSGATNFSLLKQAGDVEENPGPMGTSLLCWMALCLLGADHADT | |
| | GVSQDPRHKITKRGQNVTFRCDPISEHNRLYWYRQTLGQGPEFLTYFQNEAQLEKSRLLSDRF | |
| | SAERPKGSFSTLEIQRTEQGDSAMYLCASSLTVSDGYTFGSGTRLTVVEDLNKVEPPEVAVFE | |
| | PSEAEISHTQKATLVCLATGFFPDHVELSWWVNGKEVHSGVSTDPQPLKEQPALNDSRYCLSS | |
| | RLRVSATFWQNPRNHFRCQVQFYGLSENDEWTQDRAKPVTQIVSAEAWGRADCGFTSVSYQQG | |
| | VLSATILYEILLGKATLYAVLVSALVLMAMVKRKDF | |
| 398 | ATGACATCCATTCGAGCTGTATTTATATTCCTGTGGCTGCAGCTGGACTTGGTGAATGGAGAG | TCR X (nt) |
| | AATGTGGAGCAGCATCCTTCAACCCTGAGTGTCCAGGAGGGAGACAGCGCTGTTATCAAGTGT | |
| | ACTTATTCAGACAGTGCCTCAAACTACTTCCCTTGGTATAAGCAAGAACTTGGAAAAAGACCT | |
| | CAGCTTATTATAGACATTCGTTCAAATGTGGGCGAAAAGAAAGACCAACGAATTGCTGTTACA | |
| | TTGAACAAGACAGCCAAACATTTCTCCCTGCACATCACAGAGACCCAACCTGAAGACTCGGCT | |
| | GTCTACTTCTGTGTCGTGCTAGGGGGGGCAGGCAACATGCTCACCTTTGGAGGGGGAACAAGG | |
| | TTAATGGTCAAACCCCATATCCAGAACCCTGACCCTGCCGTGTACCAGCTGAGAGACTCTAAA | |
| | TCCAGTGACAAGTCTGTCTGCCTATTCACCGATTTTGATTCTCAAACAAATGTGTCACAAAGT | |
| | AAGGATTCTGATGTGTATATCACAGACAAAACTGTGCTAGACATGAGGTCTATGGACTTCAAG | |
| | AGCAACAGTGCTGTGGCCTGGAGCAACAAATCTGACTTTGCATGTGCAAACGCCTTCAACAAC | |
| | AGCATTATTCCAGAAGACACCTTCTTCCCCAGCCCAGAAAGTTCCTGTGATGTCAAGCTGGTC | |
| | GAGAAAAGCTTTGAAACAGATACGAACCTAAACTTTCAAAACCTGTCAGTGATTGGGTTCCGA | |
| | ATCCTCCTCCTGAAAGTGGCCGGGTTTAATCTGCTCATGACGCTGCGGCTGTGGTCCAGCGGC | |
| | TCCGGAGCCACGAACTTCTCTCTGTTAAAGCAAGCAGGAGACGTGGAAGAAAACCCCGGTCCC | |
| | ATGGGCACCAGCCTCCTCTGCTGGATGGCCCTGTGTCTCCTGGGGGCAGATCACGCAGATACT | |
| | GGAGTCTCCCAGGACCCCAGACACAAGATCACAAAGAGGGGACAGAATGTAACTTTCAGGTGT | |
| | GATCCAATTTCTGAACACAACCGCCTTTATTGGTACCGACAGACCCTGGGGCAGGGCCCAGAG | |
| | TTTCTGACTTACTTCCAGAATGAAGCTCAACTAGAAAAATCAAGGCTGCTCAGTGATCGGTTC | |
| | TCTGCAGAGAGGCCTAAGGGATCTTTCTCCACCTTGGAGATCCAGCGCACAGAGCAGGGGGAC | |
| | TCGGCCATGTATCTCTGTGCCAGCAGCTTAACGGTGTCAGATGGCTACACCTTCGGTTCGGGG | |
| | ACCAGGTTAACCGTTGTAGAGGACCTGAACAAGGTGTTCCCACCCGAGGTCGCTGTGTTTGAG | |
| | CCATCAGAAGCAGAGATCTCCCACACCCAAAAGGCCACACTGGTGTGCCTGGCCACAGGCTTC | |
| | TTCCCCGACCACGTGGAGCTGAGCTGGTGGGTGAATGGGAAGGAGGTGCACAGTGGGGTCAGC | |
| | ACGGACCCGCAGCCCCTCAAGGAGCAGCCCGCCCTCAATGACTCCAGATACTGCCTGAGCAGC | |
| | CGCCTGAGGGTCTCGGCCACCTTCTGGCAGAACCCCCGCAACCACTTCCGCTGTCAAGTCCAG | |
| | TTCTACGGGCTCTCGGAGAATGACGAGTGGACCCAGGATAGGGCCAAACCCGTCACCCAGATC | |
| | GTCAGCGCCGAGGCCTGGGGTAGAGCAGACTGTGGCTTTACCTCGGTGTCCTACCAGCAAGGG | |
| | GTCCTGTCTGCCACCATCCTCTATGAGATCCTGCTAGGGAAGGCCACCCTGTATGCTGTGCTG | |
| | GTCAGCGCCCTTGTGTTGATGGCCATGGTCAAGAGAAAGGATTTCTGA | |
| | α chain nucleotides: 1-825 | |
| | P2A nucleotides: 826-882 | |
| | ß chain nucleotides: 883-1812 | |
| 399 | ATAYSGGGADGLT | TCR Y Vα |
| | | CDR-3 |
| 400 | NSQQGEEDPQALSIQEGENATMNCSYKTSINNLQWYRQNSGRGLVHLILIRSNEREKHSGRLR | TCR Y Vα |
| | VTLDTSKKSSSLLITASRAADTASYFCATAYSGGGADGLTFGKGTHLIIQPY | (aa) |
| 401 | METLLGVSLVILWLQLARVNSQQGEEDPQALSIQEGENATMNCSYKTSINNLQWYRQNSGRGL | TCR Y Vα + |
| | VHLILIRSNEREKHSGRLRVTLDTSKKSSSLLITASRAADTASYFCATAYSGGGADGLTFGKG | ss (aa) |
| | THLIIQPY | |
| 402 | METLLGVSLVILWLQLARVNSQQGEEDPQALSIQEGENATMNCSYKTSINNLQWYRQNSGRGL | TCR Y Vα + |
| | VHLILIRSNEREKHSGRLRVTLDTSKKSSSLLITASRAADTASYFCATAYSGGGADGLTFGKG | Cα (aa) |
| | THLIIQPYIQNPDPAVYQLRDSKSSDKSVCLFTDFDSQTNVSQSKDSDVYITDKTVLDMRSMD | |
| | FKSNSAVAWSNKSDFACANAFNNSIIPEDTFFPSPESSCDVKLVEKSFETDTNLNFQNLSVIG | |
| | FRILLLKVAGFNLLMTLRLWSS | |
| 403 | ASSLIRAEKL | TCR Y Vβ |
| | | CDR-3 |
| 404 | DTGVSQNPRHKITKRGQNVTFRCDPISEHNRLYWYRQTLGQGPEFLTYFQNEAQLEKSRLLSD | TCR Y Vβ |
| | RFSAERPKGSFSTLEIQRTEQGDSAMYLCASSLIRAEKLFFGSGTQLSVLE | (aa) |
| 405 | MGTSLLCWMALCLLGADHADTGVSQNPRHKITKRGQNVTFRCDPISEHNRLYWYRQTLGQGPE | TCR Y Vβ + |
| | FLTYFQNEAQLEKSRLLSDRFSAERPKGSFSTLEIQRTEQGDSAMYLCASSLIRAEKLFFGSG | ss (aa) |
| | TQLSVLE | |
| 406 | MGTSLLCWMALCLLGADHADTGVSQNPRHKITKRGQNVTFRCDPISEHNRLYWYROTLGQGPE | TCR Y Vβ + |
| | FLTYFQNEAQLEKSRLLSDRFSAERPKGSFSTLEIQRTEQGDSAMYLCASSLIRAEKLFFGSG | Cß (aa) |
| | TQLSVLEDLNKVFPPEVAVFEPSEAEISHTQKATLVCLATGFFPDHVELSWWVNGKEVHSGVS | |
| | TDPQPLKEQPALNDSRYCLSSRLRVSATFWQNPRNHERCQVQFYGLSENDEWTQDRAKPVTQI | |
| | VSAEAWGRADCGFTSVSYQQGVLSATILYEILLGKATLYAVLVSALVLMAMVKRKDF | |
| 407 | METLLGVSLVILWLQLARVNSQQGEEDPQALSIQEGENATMNCSYKTSINNLQWYRQNSGRGL | TCR Y |
| | VHLILIRSNEREKHSGRLRVTLDTSKKSSSLLITASRAADTASYFCATAYSGGGADGLTFGKG | protein |
| | THLIIQPYIQNPDPAVYQLRDSKSSDKSVCLFTDFDSQTNVSQSKDSDVYITDKTVLDMRSMD | |
| | FKSNSAVAWSNKSDFACANAFNNSIIPEDTFFPSPESSCDVKLVEKSFETDTNLNFQNLSVIG | |
| | FRILLLKVAGFNLLMTLRLWSSGSGATNFSLLKQAGDVEENPGPMGTSLLCWMALCLLGADHA | |
| | DTGVSQNPRHKITKRGQNVTFRCDPISEHNRLYWYRQTLGQGPEFLTYFQNEAQLEKSRLLSD | |
| | RFSAERPKGSFSTLEIQRTEQGDSAMYLCASSLIRAEKLFFGSGTQLSVLEDLNKVFPPEVAV | |
| | FEPSEAEISHTQKATLVCLATGFFPDHVELSWWVNGKEVHSGVSTDPQPLKEQPALNDSRYCL | |
| | SSRLRVSATFWQNPRNHFRCQVQFYGLSENDEWTQDRAKPVTQIVSAEAWGRADCGFTSVSYQ | |
| | QGVLSATILYEILLGKATLYAVLVSALVLMAMVKRKDF | |
| 408 | ATGGAAACTCTCCTGGGAGTGTCTTTGGTGATTCTATGGCTTCAACTGGCTAGGGTGAACAGT | TCR Y (nt) |
| | CAACAGGGAGAAGAGGATCCTCAGGCCTTGAGCATCCAGGAGGGTGAAAATGCCACCATGAAC | |
| | TGCAGTTACAAAACTAGTATAAACAATTTACAGTGGTATAGACAAAATTCAGGTAGAGGCCTT | |
| | GTCCACCTAATTTTAATACGTTCAAATGAAAGAGAGAAACACAGTGGAAGATTAAGAGTCACG | |
| | CTTGACACTTCCAAGAAAAGCAGTTCCTTGTTGATCACGGCTTCCCGGGCAGCAGACACTGCT | |
| | TCTTACTTCTGTGCTACGGCGTATTCAGGAGGAGGTGCTGACGGACTCACCTTTGGCAAAGGG | |
| | ACTCATCTAATCATCCAGCCCTATATCCAGAACCCTGACCCTGCCGTGTACCAGCTGAGAGAC | |
| | TCTAAATCCAGTGACAAGTCTGTCTGCCTATTCACCGATTTTGATTCTCAAACAAATGTGTCA | |
| | CAAAGTAAGGATTCTGATGTGTATATCACAGACAAAACTGTGCTAGACATGAGGTCTATGGAC | |
| | TTCAAGAGCAACAGTGCTGTGGCCTGGAGCAACAAATCTGACTTTGCATGTGCAAACGCCTTC | |
| | AACAACAGCATTATTCCAGAAGACACCTTCTTCCCCAGCCCAGAAAGTTCCTGTGATGTCAAG | |
| | CTGGTCGAGAAAAGCTTTGAAACAGATACGAACCTAAACTTTCAAAACCTGTCAGTGATTGGG | |
| | TTCCGAATCCTCCTCCTGAAAGTGGCCGGGTTTAATCTGCTCATGACGCTGCGGCTGTGGTCC | |
| | AGCGGCTCCGGAGCCACGAACTTCTCTCTGTTAAAGCAAGCAGGAGACGTGGAAGAAAACCCC | |
| | GGTCCCATGGGCACCAGCCTCCTCTGCTGGATGGCCCTGTGTCTCCTGGGGGCAGATCACGCA | |
| | GATACTGGAGTCTCCCAGAACCCCAGACACAAGATCACAAAGAGGGGACAGAATGTAACTTTC | |
| | AGGTGTGATCCAATTTCTGAACACAACCGCCTTTATTGGTACCGACAGACCCTGGGGCAGGGC | |
| | CCAGAGTTTCTGACTTACTTCCAGAATGAAGCTCAACTAGAAAAATCAAGGCTGCTCAGTGAT | |
| | CGGTTCTCTGCAGAGAGGCCTAAGGGATCTTTCTCCACCTTGGAGATCCAGCGCACAGAGCAG | |
| | GGGGACTCGGCCATGTATCTCTGTGCCAGCAGCTTAATTCGTGCGGAAAAACTGTTTTTTGGC | |
| | AGTGGAACCCAGCTCTCTGTCTTGGAGGACCTGAACAAGGTGTTCCCACCCGAGGTCGCTGTG | |
| | TTTGAGCCATCAGAAGCAGAGATCTCCCACACCCAAAAGGCCACACTGGTGTGCCTGGCCACA | |
| | GGCTTCTTCCCCGACCACGTGGAGCTGAGCTGGTGGGTGAATGGGAAGGAGGTGCACAGTGGG | |
| | GTCAGCACGGACCCGCAGCCCCTCAAGGAGCAGCCCGCCCTCAATGACTCCAGATACTGCCTG | |
| | AGCAGCCGCCTGAGGGTCTCGGCCACCTTCTGGCAGAACCCCCGCAACCACTTCCGCTGTCAA | |
| | GTCCAGTTCTACGGGCTCTCGGAGAATGACGAGTGGACCCAGGATAGGGCCAAACCCGTCACC | |
| | CAGATCGTCAGCGCCGAGGCCTGGGGTAGAGCAGACTGTGGCTTTACCTCGGTGTCCTACCAG | |
| | CAAGGGGTCCTGTCTGCCACCATCCTCTATGAGATCCTGCTAGGGAAGGCCACCCTGTATGCT | |
| | GTGCTGGTCAGCGCCCTTGTGTTGATGGCCATGGTCAAGAGAAAGGATTTCTAG | |
| | α chain nucleotides:: 1-831 | |
| | P2A nucleotides: 832-888 | |
| | ß chain nucleotides: 889-1818 | |
| 409 | AGPKGNTPLV | TCR Z Vα |
| | | CDR-3 |
| 410 | QQVMQIPQYQHVQEGEDFTTYCNSSTTLSNIQWYKQRPGGHPVFLIQLVKSGEVKKQKRLTFQ | TCR Z Vα |
| | FGEAKKNSSLHITATQTTDVGTYFCAGPKGNTPLVFGKGTRLSVIAN | (aa) |
| 411 | MLLITSMLVLWMQLSQVNGQQVMQIPQYQHVQEGEDFTTYCNSSTTLSNIQWYKQRPGGHPVF | TCR Z Vα + |
| | LIQLVKSGEVKKQKRLTFQFGEAKKNSSLHITATQTTDVGTYFCAGPKGNTPLVFGKGTRLSV | ss (aa) |
| | IAN | |
| 412 | MLLITSMLVLWMQLSQVNGQQVMQIPQYQHVQEGEDFTTYCNSSTTLSNIQWYKQRPGGHPVF | TCR Z Vα + |
| | LIQLVKSGEVKKQKRLTFQFGEAKKNSSLHITATQTTDVGTYFCAGPKGNTPLVFGKGTRLSV | Cα (aa) |
| | IANIQNPDPAVYQLRDSKSSDKSVCLFTDFDSQTNVSQSKDSDVYITDKTVLDMRSMDFKSNS | |
| | AVAWSNKSDFACANAFNNSIIPEDTFFPSPESSCDVKLVEKSFETDTNLNFQNLSVIGFRILL | |
| | LKVAGFNLLMTLRLWSS | |
| 413 | ASSLTVSYEQY | TCR Z Vβ |
| | | CDR-3 |
| 414 | DTGVSQDPRHKITKRGQNVTFRCDPISEHNRLYWYRQTLGQGPEFLTYFQNEAQLEKSRLLSD | TCR Z Vβ |
| | RFSAERPKGSFSTLEIQRTEQGDSAMYLCASSLTVSYEQYFGPGTRLTVTE | (aa) |
| 415 | MGTSLLCWMALCLLGADHADTGVSQDPRHKITKRGQNVTFRCDPISEHNRLYWYRQTLGQGPE | TCR Z Vβ + |
| | FLTYFQNEAQLEKSRLLSDRFSAERPKGSFSTLEIQRTEQGDSAMYLCASSLTVSYEQYFGPG | ss (aa) |
| | TRLTVTE | |
| 416 | MGTSLLCWMALCLLGADHADTGVSQDPRHKITKRGQNVTFRCDPISEHNRLYWYRQTLGQGPE | TCR Z Vβ + |
| | FLTYFQNEAQLEKSRLLSDRFSAERPKGSFSTLEIQRTEQGDSAMYLCASSLTVSYEQYFGPG | Cß (aa) |
| | TRLTVTEDDLKNVFPPEVAVFEPSEAEISHTQKATLVCLATGFYPDHVELSWWVNGKEVHSGV | |
| | STDPQPLKEQPALNDSRYCLSSRLRVSATFWQNPRNHERCQVQFYGLSENDEWTQDRAKPVTQ | |
| | IVSAEAWGRADCGFTSESYQQGVLSATILYEILLGKATLYAVLVSALVLMAMVKRKDSRG | |
| 417 | MLLITSMLVLWMQLSQVNGQQVMQIPQYQHVQEGEDFTTYCNSSTTLSNIQWYKQRPGGHPVF | TCR Z |
| | LIQLVKSGEVKKQKRLTFQFGEAKKNSSLHITATQTTDVGTYFCAGPKGNTPLVFGKGTRLSV | protein |
| | IANIQNPDPAVYQLRDSKSSDKSVCLFTDFDSQTNVSQSKDSDVYITDKTVLDMRSMDFKSNS | |
| | AVAWSNKSDFACANAFNNSIIPEDTFFPSPESSCDVKLVEKSFETDTNLNFQNLSVIGFRILL | |
| | LKVAGFNLLMTLRLWSSGSGATNFSLLKQAGDVEENPGPMGTSLLCWMALCLLGADHADTGVS | |
| | QDPRHKITKRGQNVTFRCDPISEHNRLYWYRQTLGQGPEFLTYFQNEAQLEKSRLLSDRESAE | |
| | RPKGSFSTLEIQRTEQGDSAMYLCASSLTVSYEQYFGPGTRLTVTEDLKNVEPPEVAVFEPSE | |
| | AEISHTQKATLVCLATGFYPDHVELSWWVNGKEVHSGVSTDPQPLKEQPALNDSRYCLSSRLR | |
| | VSATFWQNPRNHFRCQVQFYGLSENDEWTQDRAKPVTQIVSAEAWGRADCGFTSESYQQGVLS | |
| | ATILYEILLGKATLYAVLVSALVLMAMVKRKDSRG | |
| 418 | ATGCTACTCATCACATCAATGTTGGTCTTATGGATGCAATTGTCACAGGTGAATGGACAACAG | TCR Z (nt) |
| | GTAATGCAAATTCCTCAGTACCAGCATGTACAAGAAGGAGAGGACTTCACCACGTACTGCAAT | |
| | TCCTCAACTACTTTAAGCAATATACAGTGGTATAAGCAAAGGCCTGGTGGACATCCCGTTTTT | |
| | TTGATACAGTTAGTGAAGAGTGGAGAAGTGAAGAAGCAGAAAAGACTGACATTTCAGTTTGGA | |
| | GAAGCAAAAAAGAACAGCTCCCTGCACATCACAGCCACCCAGACTACAGATGTAGGAACCTAC | |
| | TTCTGTGCAGGGCCGAAAGGAAACACACCTCTTGTCTTTGGAAAGGGCACAAGACTTTCTGTG | |
| | ATTGCAAATATCCAGAACCCTGACCCTGCCGTGTACCAGCTGAGAGACTCTAAATCCAGTGAC | |
| | AAGTCTGTCTGCCTATTCACCGATTTTGATTCTCAAACAAATGTGTCACAAAGTAAGGATTCT | |
| | GATGTGTATATCACAGACAAAACTGTGCTAGACATGAGGTCTATGGACTTCAAGAGCAACAGT | |
| | GCTGTGGCCTGGAGCAACAAATCTGACTTTGCATGTGCAAACGCCTTCAACAACAGCATTATT | |
| | CCAGAAGACACCTTCTTCCCCAGCCCAGAAAGTTCCTGTGATGTCAAGCTGGTCGAGAAAAGC | |
| | TTTGAAACAGATACGAACCTAAACTTTCAAAACCTGTCAGTGATTGGGTTCCGAATCCTCCTC | |
| | CTGAAAGTGGCCGGGTTTAATCTGCTCATGACGCTGCGGCTGTGGTCCAGCGGCTCCGGAGCC | |
| | ACGAACTTCTCTCTGTTAAAGCAAGCAGGAGACGTGGAAGAAAACCCCGGTCCCATGGGCACC | |
| | AGCCTCCTCTGCTGGATGGCCCTGTGTCTCCTGGGGGCAGATCACGCAGATACTGGAGTCTCC | |
| | CAGGACCCCAGACACAAGATCACAAAGAGGGGACAGAATGTAACTTTCAGGTGTGATCCAATT | |
| | TCTGAACACAACCGCCTTTATTGGTACCGACAGACCCTGGGGCAGGGCCCAGAGTTTCTGACT | |
| | TACTTCCAGAATGAAGCTCAACTAGAAAAATCAAGGCTGCTCAGTGATCGGTTCTCTGCAGAG | |
| | AGGCCTAAGGGATCTTTCTCCACCTTGGAGATCCAGCGCACAGAGCAGGGGGACTCGGCCATG | |
| | TATCTCTGTGCCAGCAGCTTAACAGTCTCCTACGAGCAGTACTTCGGGCCGGGCACCAGGCTC | |
| | ACGGTCACAGAGGACCTGAAAAACGTGTTCCCACCCGAGGTCGCTGTGTTTGAGCCATCAGAA | |
| | GCAGAGATCTCCCACACCCAAAAGGCCACACTGGTGTGCCTGGCCACAGGCTTCTACCCCGAC | |
| | CACGTGGAGCTGAGCTGGTGGGTGAATGGGAAGGAGGTGCACAGTGGGGTCAGCACAGACCCG | |
| | CAGCCCCTCAAGGAGCAGCCCGCCCTCAATGACTCCAGATACTGCCTGAGCAGCCGCCTGAGG | |
| | GTCTCGGCCACCTTCTGGCAGAACCCCCGCAACCACTTCCGCTGTCAAGTCCAGTTCTACGGG | |
| | CTCTCGGAGAATGACGAGTGGACCCAGGATAGGGCCAAACCTGTCACCCAGATCGTCAGCGCC | |
| | GAGGCCTGGGGTAGAGCAGACTGTGGCTTCACCTCCGAGTCTTACCAGCAAGGGGTCCTGTCT | |
| | GCCACCATCCTCTATGAGATCTTGCTAGGGAAGGCCACCTTGTATGCCGTGCTGGTCAGTGCC | |
| | CTCGTGCTGATGGCCATGGTCAAGAGAAAGGATTCCAGAGGCTGA | |
| | α chain nucleotides:: 1-816 | |
| | P2A nucleotides: 817-873 | |
| | ß chain nucleotides: 874-1809 | |
| 419 | AASSPGTYKYI | TCR AA Vα |
| | | CDR-3 |
| 420 | SGQQKEKSDQQQVKQSPQSLIVQKGGISIINCAYENTAFDYFPWYQQFPGKGPALLIAIRPDV | TCR AA Vα |
| | SEKKEGRFTISFNKSAKQFSLHIMDSQPGDSATYFCAASSPGTYKYIFGTGTRLKVLAN | (aa) |
| 421 | MDKILGASFLVLWLQLCWVSGQQKEKSDQQQVKQSPQSLIVQKGGISIINCAYENTAFDYFPW | TCR AA Vα + |
| | YQQFPGKGPALLIAIRPDVSEKKEGRFTISFNKSAKQFSLHIMDSQPGDSATYFCAASSPGTY | ss (aa) |
| | KYIFGTGTRLKVLAN | |
| 422 | MDKILGASFLVLWLQLCWVSGQQKEKSDQQQVKQSPQSLIVQKGGISIINCAYENTAFDYFPW | TCR AA Vα + |
| | YQQFPGKGPALLIAIRPDVSEKKEGRFTISFNKSAKQFSLHIMDSQPGDSATYFCAASSPGTY | Ca (aa) |
| | KYIFGTGTRLKVLANIQNPDPAVYQLRDSKSSDKSVCLFTDFDSQTNVSQSKDSDVYITDKTV | |
| | LDMRSMDFKSNSAVAWSNKSDFACANAFNNSIIPEDTFFPSPESSCDVKLVEKSFETDTNLNF | |
| | QNLSVIGFRILLLKVAGFNLLMTLRLWSS | |
| 423 | ASSLLKNTEA | TCR AA Vβ |
| | | CDR-3 |
| 424 | DTGVSQDPRHKITKRGQNVTFRCDPISEHNRLYWYRQTLGQGPEFLTYFQNEAQLEKSRLLSD | TCR AA Vβ |
| | RFSAERPKGSFSTLEIQRTEQGDSAMYLCASSLLKNTEAFFGQGTRLTVVE | (aa) |
| 425 | MGTSLLCWMALCLLGADHADTGVSQDPRHKITKRGQNVTFRCDPISEHNRLYWYRQTLGQGPE | TCR AA Vβ + |
| | FLTYFQNEAQLEKSRLLSDRFSAERPKGSFSTLEIQRTEQGDSAMYLCASSLLKNTEAFFGQG | ss (aa) |
| | TRLTVVE | |
| 426 | MGTSLLCWMALCLLGADHADTGVSQDPRHKITKRGQNVTFRCDPISEHNRLYWYRQTLGQGPE | TCR AA Vβ + |
| | FLTYFQNEAQLEKSRLLSDRFSAERPKGSFSTLEIQRTEQGDSAMYLCASSLLKNTEAFFGQG | Cß (aa) |
| | TRLTVVEDLNKVFPPEVAVFEPSEAEISHTQKATLVCLATGFFPDHVELSWWVNGKEVHSGVS | |
| | TDPQPLKEQPALNDSRYCLSSRLRVSATFWQNPRNHERCQVQFYGLSENDEWTQDRAKPVTQI | |
| | VSAEAWGRADCGFTSVSYQQGVLSATILYEILLGKATLYAVLVSALVLMAMVKRKDF | |
| 427 | MDKILGASFLVLWLQLCWVSGQQKEKSDQQQVKQSPQSLIVQKGGISIINCAYENTAFDYFPW | TCR AA |
| | YQQFPGKGPALLIAIRPDVSEKKEGRFTISFNKSAKQFSLHIMDSQPGDSATYFCAASSPGTY | protein |
| | KYIFGTGTRLKVLANIQNPDPAVYQLRDSKSSDKSVCLFTDFDSQTNVSQSKDSDVYITDKTV | |
| | LDMRSMDFKSNSAVAWSNKSDFACANAFNNSIIPEDTFFPSPESSCDVKLVEKSFETDTNLNF | |
| | QNLSVIGFRILLLKVAGENLLMTLRLWSSGSGATNFSLLKQAGDVEENPGPMGTSLLCWMALC | |
| | LLGADHADTGVSQDPRHKITKRGQNVTFRCDPISEHNRLYWYRQTLGQGPEFLTYFQNEAQLE | |
| | KSRLLSDRFSAERPKGSESTLEIQRTEQGDSAMYLCASSLLKNTEAFFGQGTRLTVVEDLNKV | |
| | FPPEVAVFEPSEAEISHTQKATLVCLATGFFPDHVELSWWVNGKEVHSGVSTDPQPLKEQPAL | |
| | NDSRYCLSSRLRVSATFWQNPRNHFRCQVQFYGLSENDEWTQDRAKPVTQIVSAEAWGRADCG | |
| | FTSVSYQQGVLSATILYEILLGKATLYAVLVSALVLMAMVKRKDF | |
| 428 | ATGGACAAGATCTTAGGAGCATCATTTTTAGTTCTGTGGCTTCAACTATGCTGGGTGAGTGGC | TCR AA (nt) |
| | CAACAGAAGGAGAAAAGTGACCAGCAGCAGGTGAAACAAAGTCCTCAATCTTTGATAGTCCAG | |
| | AAAGGAGGGATTTCAATTATAAACTGTGCTTATGAGAACACTGCGTTTGACTACTTTCCATGG | |
| | TACCAACAATTCCCTGGGAAAGGCCCTGCATTATTGATAGCCATACGTCCAGATGTGAGTGAA | |
| | AAGAAAGAAGGAAGATTCACAATCTCCTTCAATAAAAGTGCCAAGCAGTTCTCATTGCATATC | |
| | ATGGATTCCCAGCCTGGAGACTCAGCCACCTACTTCTGTGCAGCAAGCAGCCCAGGAACCTAC | |
| | AAATACATCTTTGGAACAGGCACCAGGCTGAAGGTTTTAGCAAATATCCAGAACCCTGACCCT | |
| | GCCGTGTACCAGCTGAGAGACTCTAAATCCAGTGACAAGTCTGTCTGCCTATTCACCGATTTT | |
| | GATTCTCAAACAAATGTGTCACAAAGTAAGGATTCTGATGTGTATATCACAGACAAAACTGTG | |
| | CTAGACATGAGGTCTATGGACTTCAAGAGCAACAGTGCTGTGGCCTGGAGCAACAAATCTGAC | |
| | TTTGCATGTGCAAACGCCTTCAACAACAGCATTATTCCAGAAGACACCTTCTTCCCCAGCCCA | |
| | GAAAGTTCCTGTGATGTCAAGCTGGTCGAGAAAAGCTTTGAAACAGATACGAACCTAAACTTT | |
| | CAAAACCTGTCAGTGATTGGGTTCCGAATCCTCCTCCTGAAAGTGGCCGGGTTTAATCTGCTC | |
| | ATGACGCTGCGGCTGTGGTCCAGCGGCTCCGGAGCCACGAACTTCTCTCTGTTAAAGCAAGCA | |
| | GGAGACGTGGAAGAAAACCCCGGTCCCATGGGCACCAGCCTCCTCTGCTGGATGGCCCTGTGT | |
| | CTCCTGGGGGCAGATCACGCAGATACTGGAGTCTCCCAGGACCCCAGACACAAGATCACAAAG | |
| | AGGGGACAGAATGTAACTTTCAGGTGTGATCCAATTTCTGAACACAACCGCCTTTATTGGTAC | |
| | CGACAGACCCTGGGGCAGGGCCCAGAGTTTCTGACTTACTTCCAGAATGAAGCTCAACTAGAA | |
| | AAATCAAGGCTGCTCAGTGATCGGTTCTCTGCAGAGAGGCCTAAGGGATCTTTCTCCACCTTG | |
| | GAGATCCAGCGCACAGAGCAGGGGGACTCGGCCATGTATCTCTGTGCCAGCAGCCTCTTGAAG | |
| | AACACTGAAGCTTTCTTTGGACAAGGCACCAGACTCACAGTTGTAGAGGACCTGAACAAGGTG | |
| | TTCCCACCCGAGGTCGCTGTGTTTGAGCCATCAGAAGCAGAGATCTCCCACACCCAAAAGGCC | |
| | ACACTGGTGTGCCTGGCCACAGGCTTCTTCCCCGACCACGTGGAGCTGAGCTGGTGGGTGAAT | |
| | GGGAAGGAGGTGCACAGTGGGGTCAGCACGGACCCGCAGCCCCTCAAGGAGCAGCCCGCCCTC | |
| | AATGACTCCAGATACTGCCTGAGCAGCCGCCTGAGGGTCTCGGCCACCTTCTGGCAGAACCCC | |
| | CGCAACCACTTCCGCTGTCAAGTCCAGTTCTACGGGCTCTCGGAGAATGACGAGTGGACCCAG | |
| | GATAGGGCCAAACCCGTCACCCAGATCGTCAGCGCCGAGGCCTGGGGTAGAGCAGACTGTGGC | |
| | TTTACCTCGGTGTCCTACCAGCAAGGGGTCCTGTCTGCCACCATCCTCTATGAGATCCTGCTA | |
| | GGGAAGGCCACCCTGTATGCTGTGCTGGTCAGCGCCCTTGTGTTGATGGCCATGGTCAAGAGA | |
| | AAGGATTTCTGA | |
| | α chain nucleotides: 1-852 | |
| | P2A nucleotides: 853-909 | |
| | ß chain nucleotides: 910-1839 | |
| 429 | AVRVPTGGYQKVT | TCR AB Vα |
| | | CDR-3 |
| 430 | AQSVAQPEDQVNVAEGNPLTVKCTYSVSGNPYLFWYVQYPNRGLQFLLKYITGDNLVKGSYGF | TCR AB Vα |
| | EAEFNKSQTSFHLKKPSALVSDSALYFCAVRVPTGGYQKVTFGIGTKLQVIPN | (aa) |
| 431 | MASAPISMLAMLFTLSGLRAQSVAQPEDQVNVAEGNPLTVKCTYSVSGNPYLFWYVQYPNRGL | TCR AB Vα + |
| | QFLLKYITGDNLVKGSYGFEAEFNKSQTSFHLKKPSALVSDSALYFCAVRVPTGGYQKVTFGI | ss (aa) |
| | GTKLQVIPN | |
| 432 | MASAPISMLAMLFTLSGLRAQSVAQPEDQVNVAEGNPLTVKCTYSVSGNPYLFWYVQYPNRGL | TCR AB Vα + |
| | QFLLKYITGDNLVKGSYGFEAEFNKSQTSFHLKKPSALVSDSALYFCAVRVPTGGYQKVTFGI | Cα (aa) |
| | GTKLQVIPNIQNPDPAVYQLRDSKSSDKSVCLFTDFDSQTNVSQSKDSDVYITDKTVLDMRSM | |
| | DFKSNSAVAWSNKSDFACANAFNNSIIPEDTFFPSPESSCDVKLVEKSFETDTNLNFQNLSVI | |
| | GFRILLLKVAGFNLLMTLRLWSS | |
| 433 | ASKLTDTQY | TCR AB Vβ |
| | | CDR-3 |
| 434 | DTGVSQNPRHKITKRGQNVTFRCDPISEHNRLYWYRQTLGQGPEFLTYFQNEAQLEKSRLLSD | TCR AB Vβ |
| | RFSAERPKGSFSTLEIQRTEQGDSAMYLCASKLTDTQYFGPGTRLTVLE | (aa) |
| 435 | MGTSLLCWMALCLLGADHADTGVSQNPRHKITKRGQNVTFRCDPISEHNRLYWYRQTLGQGPE | TCR AB Vβ + |
| | FLTYFQNEAQLEKSRLLSDRFSAERPKGSFSTLEIQRTEQGDSAMYLCASKLTDTQYFGPGTR | ss (aa) |
| | LTVLE | |
| 436 | MGTSLLCWMALCLLGADHADTGVSQNPRHKITKRGQNVTFRCDPISEHNRLYWYRQTLGQGPE | TCR AB Vβ + |
| | FLTYFQNEAQLEKSRLLSDRFSAERPKGSFSTLEIQRTEQGDSAMYLCASKLTDTQYFGPGTR | Cß (aa) |
| | LTVLEDLKNVFPPEVAVFEPSEAEISHTQKATLVCLATGFYPDHVELSWWVNGKEVHSGVSTD | |
| | PQPLKEQPALNDSRYCLSSRLRVSATFWQNPRNHERCQVQFYGLSENDEWTQDRAKPVTQIVS | |
| | AEAWGRADCGFTSESYQQGVLSATILYEILLGKATLYAVLVSALVLMAMVKRKDSRG | |
| 437 | MASAPISMLAMLFTLSGLRAQSVAQPEDQVNVAEGNPLTVKCTYSVSGNPYLFWYVQYPNRGL | TCR AB |
| | QFLLKYITGDNLVKGSYGFEAEFNKSQTSFHLKKPSALVSDSALYFCAVRVPTGGYQKVTFGI | protein |
| | GTKLQVIPNIQNPDPAVYQLRDSKSSDKSVCLFTDFDSQTNVSQSKDSDVYITDKTVLDMRSM | |
| | DFKSNSAVAWSNKSDFACANAFNNSIIPEDTFFPSPESSCDVKLVEKSFETDTNLNFQNLSVI | |
| | GFRILLLKVAGENLLMTLRLWSSGSGATNFSLLKQAGDVEENPGPMGTSLLCWMALCLLGADH | |
| | ADTGVSQNPRHKITKRGQNVTFRCDPISEHNRLYWYRQTLGQGPEFLTYFQNEAQLEKSRLLS | |
| | DRFSAERPKGSFSTLEIQRTEQGDSAMYLCASKLTDTQYFGPGTRLTVLEDLKNVFPPEVAVE | |
| | EPSEAEISHTQKATLVCLATGFYPDHVELSWWVNGKEVHSGVSTDPQPLKEQPALNDSRYCLS | |
| | SRLRVSATFWQNPRNHFRCQVQFYGLSENDEWTQDRAKPVTQIVSAEAWGRADCGFTSESYQQ | |
| | GVLSATILYEILLGKATLYAVLVSALVLMAMVKRKDSRG | |
| 438 | ATGGCCTCTGCACCCATCTCGATGCTTGCGATGCTCTTCACATTGAGTGGGCTGAGAGCTCAG | TCR AB (nt) |
| | TCAGTGGCTCAGCCGGAAGATCAGGTCAACGTTGCTGAAGGGAATCCTCTGACTGTGAAATGC | |
| | ACCTATTCAGTCTCTGGAAACCCTTATCTTTTTTGGTATGTTCAATACCCCAACCGAGGCCTC | |
| | CAGTTCCTTCTGAAATACATCACAGGGGATAACCTGGTTAAAGGCAGCTATGGCTTTGAAGCT | |
| | GAATTTAACAAGAGCCAAACCTCCTTCCACCTGAAGAAACCATCTGCCCTTGTGAGCGACTCC | |
| | GCTTTGTACTTCTGTGCTGTGAGAGTCCCGACTGGGGGTTACCAGAAAGTTACCTTTGGAATT | |
| | GGAACAAAGCTCCAAGTCATCCCAAATATCCAGAACCCTGACCCTGCCGTGTACCAGCTGAGA | |
| | GACTCTAAATCCAGTGACAAGTCTGTCTGCCTATTCACCGATTTTGATTCTCAAACAAATGTG | |
| | TCACAAAGTAAGGATTCTGATGTGTATATCACAGACAAAACTGTGCTAGACATGAGGTCTATG | |
| | GACTTCAAGAGCAACAGTGCTGTGGCCTGGAGCAACAAATCTGACTTTGCATGTGCAAACGCC | |
| | TTCAACAACAGCATTATTCCAGAAGACACCTTCTTCCCCAGCCCAGAAAGTTCCTGTGATGTC | |
| | AAGCTGGTCGAGAAAAGCTTTGAAACAGATACGAACCTAAACTTTCAAAACCTGTCAGTGATT | |
| | GGGTTCCGAATCCTCCTCCTGAAAGTGGCCGGGTTTAATCTGCTCATGACGCTGCGGCTGTGG | |
| | TCCAGCGGCTCCGGAGCCACGAACTTCTCTCTGTTAAAGCAAGCAGGAGACGTGGAAGAAAAC | |
| | CCCGGTCCCATGGGCACCAGCCTCCTCTGCTGGATGGCCCTGTGTCTCCTGGGGGCAGATCAC | |
| | GCAGATACTGGAGTCTCCCAGAACCCCAGACACAAGATCACAAAGAGGGGACAGAATGTAACT | |
| | TTCAGGTGTGATCCAATTTCTGAACACAACCGCCTTTATTGGTACCGACAGACCCTGGGGCAG | |
| | GGCCCAGAGTTTCTGACTTACTTCCAGAATGAAGCTCAACTAGAAAAATCAAGGCTGCTCAGT | |
| | GATCGGTTCTCTGCAGAGAGGCCTAAGGGATCTTTCTCCACCTTGGAGATCCAGCGCACAGAG | |
| | CAGGGGGACTCGGCCATGTATCTCTGTGCCAGCAAGCTTACAGATACGCAGTATTTTGGCCCA | |
| | GGCACCCGGCTGACAGTGCTCGAGGACCTGAAAAACGTGTTCCCACCCGAGGTCGCTGTGTTT | |
| | GAGCCATCAGAAGCAGAGATCTCCCACACCCAAAAGGCCACACTGGTGTGCCTGGCCACAGGC | |
| | TTCTACCCCGACCACGTGGAGCTGAGCTGGTGGGTGAATGGGAAGGAGGTGCACAGTGGGGTC | |
| | AGCACAGACCCGCAGCCCCTCAAGGAGCAGCCCGCCCTCAATGACTCCAGATACTGCCTGAGC | |
| | AGCCGCCTGAGGGTCTCGGCCACCTTCTGGCAGAACCCCCGCAACCACTTCCGCTGTCAAGTC | |
| | CAGTTCTACGGGCTCTCGGAGAATGACGAGTGGACCCAGGATAGGGCCAAACCTGTCACCCAG | |
| | ATCGTCAGCGCCGAGGCCTGGGGTAGAGCAGACTGTGGCTTCACCTCCGAGTCTTACCAGCAA | |
| | GGGGTCCTGTCTGCCACCATCCTCTATGAGATCTTGCTAGGGAAGGCCACCTTGTATGCCGTG | |
| | CTGGTCAGTGCCCTCGTGCTGATGGCCATGGTCAAGAGAAAGGATTCCAGAGGCTGA | |
| | α chain nucleotides: : 1-834 | |
| | P2A nucleotides: 835-891 | |
| | ß chain nucleotides: 892-1821 | |
| 439 | AKNDMR | TCR AC Vα |
| | | CDR-3 |
| 440 | NSQQGEEDPQALSIQEGENATMNCSYKTSINNLQWYRQNSGRGLVHLILIRSNEREKHSGRLR | TCR AC Vα |
| | VTLDTSKKSSSLLITASRAADTASYFCAKNDMRFGAGTRLTVKPN | (aa) |
| 441 | METLLGVSLVILWLQLARVNSQQGEEDPQALSIQEGENATMNCSYKTSINNLQWYRQNSGRGL | TCR AC Vα + |
| | VHLILIRSNEREKHSGRLRVTLDTSKKSSSLLITASRAADTASYFCAKNDMRFGAGTRLTVKP | ss (aa) |
| | N | |
| 442 | METLLGVSLVILWLQLARVNSQQGEEDPQALSIQEGENATMNCSYKTSINNLQWYRQNSGRGL | TCR AC Vα + |
| | VHLILIRSNEREKHSGRLRVTLDTSKKSSSLLITASRAADTASYFCAKNDMRFGAGTRLTVKP | Cα (aa) |
| | NIQNPDPAVYQLRDSKSSDKSVCLFTDFDSQTNVSQSKDSDVYITDKTVLDMRSMDFKSNSAV | |
| | AWSNKSDFACANAFNNSIIPEDTFFPSPESSCDVKLVEKSFETDTNLNFQNLSVIGFRILLLK | |
| | VAGFNLLMTLRLWSS | |
| 443 | ASSLLVGETQY | TCR AC Vβ |
| | | CDR-3 |
| 444 | DTGVSQNPRHKITKRGQNVTFRCDPISEHNRLYWYRQTLGQGPEFLTYFQNEAQLEKSRLLSD | TCR AC Vβ |
| | RFSAERPKGSFSTLEIQRTEQGDSAMYLCASSLLVGETQYFGPGTRLLVLE | (aa) |
| 445 | MGTSLLCWMALCLLGADHADTGVSQNPRHKITKRGQNVTFRCDPISEHNRLYWYRQTLGQGPE | TCR AC Vβ + |
| | FLTYFQNEAQLEKSRLLSDRFSAERPKGSFSTLEIQRTEQGDSAMYLCASSLLVGETQYFGPG | ss (aa) |
| | TRLLVLE | |
| 446 | MGTSLLCWMALCLLGADHADTGVSQNPRHKITKRGQNVTFRCDPISEHNRLYWYRQTLGQGPE | TCR AC Vβ + |
| | FLTYFQNEAQLEKSRLLSDRFSAERPKGSESTLEIQRTEQGDSAMYLCASSLLVGETQYFGPG | Cß (aa) |
| | TRLLVLEDLKNVFPPEVAVFEPSEAEISHTQKATLVCLATGFYPDHVELSWWVNGKEVHSGVS | |
| | TDPQPLKEQPALNDSRYCLSSRLRVSATFWQNPRNHERCQVQFYGLSENDEWTQDRAKPVTQI | |
| | VSAEAWGRADCGFTSESYQQGVLSATILYEILLGKATLYAVLVSALVLMAMVKRKDSRG | |
| 447 | METLLGVSLVILWLQLARVNSQQGEEDPQALSIQEGENATMNCSYKTSINNLQWYRQNSGRGL | TCR AC |
| | VHLILIRSNEREKHSGRLRVTLDTSKKSSSLLITASRAADTASYFCAKNDMRFGAGTRLTVKP | protein |
| | NIQNPDPAVYQLRDSKSSDKSVCLFTDFDSQTNVSQSKDSDVYITDKTVLDMRSMDFKSNSAV | |
| | AWSNKSDFACANAFNNSIIPEDTFFPSPESSCDVKLVEKSFETDTNLNFQNLSVIGFRILLLK | |
| | VAGFNLLMTLRLWSSGSGATNFSLLKQAGDVEENPGPMGTSLLCWMALCLLGADHADTGVSQN | |
| | PRHKITKRGQNVTFRCDPISEHNRLYWYRQTLGQGPEFLTYFQNEAQLEKSRLLSDRESAERP | |
| | KGSFSTLEIQRTEQGDSAMYLCASSLLVGETQYFGPGTRLLVLEDLKNVFPPEVAVFEPSEAE | |
| | ISHTQKATLVCLATGFYPDHVELSWWVNGKEVHSGVSTDPQPLKEQPALNDSRYCLSSRLRVS | |
| | ATFWQNPRNHFRCQVQFYGLSENDEWTQDRAKPVTQIVSAEAWGRADCGFTSESYQQGVLSAT | |
| | ILYEILLGKATLYAVLVSALVLMAMVKRKDSRG | |
| 448 | ATGGAAACTCTCCTGGGAGTGTCTTTGGTGATTCTATGGCTTCAACTGGCTAGGGTGAACAGT | TCR AC (nt) |
| | CAACAGGGAGAAGAGGATCCTCAGGCCTTGAGCATCCAGGAGGGTGAAAATGCCACCATGAAC | |
| | TGCAGTTACAAAACTAGTATAAACAATTTACAGTGGTATAGACAAAATTCAGGTAGAGGCCTT | |
| | GTCCACCTAATTTTAATACGTTCAAATGAAAGAGAGAAACACAGTGGAAGATTAAGAGTCACG | |
| | CTTGACACTTCCAAGAAAAGCAGTTCCTTGTTGATCACGGCTTCCCGGGCAGCAGACACTGCT | |
| | TCTTACTTCTGTGCTAAGAATGACATGCGCTTTGGAGCAGGGACCAGACTGACAGTAAAACCA | |
| | AATATCCAGAACCCTGACCCTGCCGTGTACCAGCTGAGAGACTCTAAATCCAGTGACAAGTCT | |
| | GTCTGCCTATTCACCGATTTTGATTCTCAAACAAATGTGTCACAAAGTAAGGATTCTGATGTG | |
| | TATATCACAGACAAAACTGTGCTAGACATGAGGTCTATGGACTTCAAGAGCAACAGTGCTGTG | |
| | GCCTGGAGCAACAAATCTGACTTTGCATGTGCAAACGCCTTCAACAACAGCATTATTCCAGAA | |
| | GACACCTTCTTCCCCAGCCCAGAAAGTTCCTGTGATGTCAAGCTGGTCGAGAAAAGCTTTGAA | |
| | ACAGATACGAACCTAAACTTTCAAAACCTGTCAGTGATTGGGTTCCGAATCCTCCTCCTGAAA | |
| | GTGGCCGGGTTTAATCTGCTCATGACGCTGCGGCTGTGGTCCAGCGGCTCCGGAGCCACGAAC | |
| | TTCTCTCTGTTAAAGCAAGCAGGAGACGTGGAAGAAAACCCCGGTCCCATGGGCACCAGCCTC | |
| | CTCTGCTGGATGGCCCTGTGTCTCCTGGGGGCAGATCACGCAGATACTGGAGTCTCCCAGAAC | |
| | CCCAGACACAAGATCACAAAGAGGGGACAGAATGTAACTTTCAGGTGTGATCCAATTTCTGAA | |
| | CACAACCGCCTTTATTGGTACCGACAGACCCTGGGGCAGGGCCCAGAGTTTCTGACTTACTTC | |
| | CAGAATGAAGCTCAACTAGAAAAATCAAGGCTGCTCAGTGATCGGTTCTCTGCAGAGAGGCCT | |
| | AAGGGATCTTTCTCCACCTTGGAGATCCAGCGCACAGAGCAGGGGGACTCGGCCATGTATCTC | |
| | TGTGCCAGCAGCTTACTGGTGGGAGAGACCCAGTACTTCGGGCCAGGCACGCGGCTCCTGGTG | |
| | CTCGAGGACCTGAAAAACGTGTTCCCACCCGAGGTCGCTGTGTTTGAGCCATCAGAAGCAGAG | |
| | ATCTCCCACACCCAAAAGGCCACACTGGTGTGCCTGGCCACAGGCTTCTACCCCGACCACGTG | |
| | GAGCTGAGCTGGTGGGTGAATGGGAAGGAGGTGCACAGTGGGGTCAGCACAGACCCGCAGCCC | |
| | CTCAAGGAGCAGCCCGCCCTCAATGACTCCAGATACTGCCTGAGCAGCCGCCTGAGGGTCTCG | |
| | GCCACCTTCTGGCAGAACCCCCGCAACCACTTCCGCTGTCAAGTCCAGTTCTACGGGCTCTCG | |
| | GAGAATGACGAGTGGACCCAGGATAGGGCCAAACCTGTCACCCAGATCGTCAGCGCCGAGGCC | |
| | TGGGGTAGAGCAGACTGTGGCTTCACCTCCGAGTCTTACCAGCAAGGGGTCCTGTCTGCCACC | |
| | ATCCTCTATGAGATCTTGCTAGGGAAGGCCACCTTGTATGCCGTGCTGGTCAGTGCCCTCGTG | |
| | CTGATGGCCATGGTCAAGAGAAAGGATTCCAGAGGCTGA | |
| | α chain nucleotides: 1-810 | |
| | P2A nucleotides: 811-867 | |
| | ß chain nucleotides: 868-1803 | |
| 449 | ATVPTDYMYSGGGADGLT | TCR AD Vα |
| | | CDR-3 |
| 450 | NSQQGEEDPQALSIQEGENATMNCSYKTSINNLQWYRQNSGRGLVHLILIRSNEREKHSGRLR | TCR AD Vα |
| | VTLDTSKKSSSLLITASRAADTASYFCATVPTDYMYSGGGADGLTFGKGTHLIIQPY | (aa) |
| 451 | METLLGVSLVILWLQLARVNSQQGEEDPQALSIQEGENATMNCSYKTSINNLQWYRQNSGRGL | TCR AD Vα + |
| | VHLILIRSNEREKHSGRLRVTLDTSKKSSSLLITASRAADTASYFCATVPTDYMYSGGGADGL | ss (aa) |
| | TFGKGTHLIIQPY | |
| 452 | METLLGVSLVILWLQLARVNSQQGEEDPQALSIQEGENATMNCSYKTSINNLQWYRQNSGRGL | TCR AD Vα + |
| | VHLILIRSNEREKHSGRLRVTLDTSKKSSSLLITASRAADTASYFCATVPTDYMYSGGGADGL | Cα (aa) |
| | TFGKGTHLIIQPYIQNPDPAVYQLRDSKSSDKSVCLFTDFDSQTNVSQSKDSDVYITDKTVLD | |
| | MRSMDFKSNSAVAWSNKSDFACANAFNNSIIPEDTFFPSPESSCDVKLVEKSFETDTNLNFQN | |
| | LSVIGFRILLLKVAGFNLLMTLRLWSS | |
| 453 | ASSLVRLDGYT | TCR AD Vβ |
| | | CDR-3 |
| 454 | DTGVSQNPRHKITKRGQNVTFRCDPISEHNRLYWYRQTLGQGPEFLTYFQNEAQLEKSRLLSD | TCR AD Vβ |
| | RFSAERPKGSFSTLEIQRTEQGDSAMYLCASSLVRLDGYTFGSGTRLTVVE | (aa) |
| 455 | MGTSLLCWMALCLLGADHADTGVSQNPRHKITKRGQNVTFRCDPISEHNRLYWYRQTLGQGPE | TCR AD Vβ + |
| | FLTYFQNEAQLEKSRLLSDRFSAERPKGSESTLEIQRTEQGDSAMYLCASSLVRLDGYTFGSG | ss (aa) |
| | TRLTVVE | |
| 456 | MGTSLLCWMALCLLGADHADTGVSQNPRHKITKRGQNVTFRCDPISEHNRLYWYRQTLGQGPE | TCR AD Vβ + |
| | FLTYFQNEAQLEKSRLLSDRFSAERPKGSFSTLEIQRTEQGDSAMYLCASSLVRLDGYTFGSG | Cß (aa) |
| | TRLTVVEDLNKVFPPEVAVFEPSEAEISHTQKATLVCLATGFFPDHVELSWWVNGKEVHSGVS | |
| | TDPQPLKEQPALNDSRYCLSSRLRVSATFWQNPRNHERCQVQFYGLSENDEWTQDRAKPVTQI | |
| | VSAEAWGRADCGFTSVSYQQGVLSATILYEILLGKATLYAVLVSALVLMAMVKRKDF | |
| 457 | METLLGVSLVILWLQLARVNSQQGEEDPQALSIQEGENATMNCSYKTSINNLQWYRQNSGRGL | TCR AD |
| | VHLILIRSNEREKHSGRLRVTLDTSKKSSSLLITASRAADTASYFCATVPTDYMYSGGGADGL | protein |
| | TFGKGTHLIIQPYIQNPDPAVYQLRDSKSSDKSVCLFTDFDSQTNVSQSKDSDVYITDKTVLD | |
| | MRSMDFKSNSAVAWSNKSDFACANAFNNSIIPEDTFFPSPESSCDVKLVEKSFETDTNLNFQN | |
| | LSVIGFRILLLKVAGFNLLMTLRLWSSGSGATNFSLLKQAGDVEENPGPMGTSLLCWMALCLL | |
| | GADHADTGVSQNPRHKITKRGQNVTFRCDPISEHNRLYWYRQTLGQGPEFLTYFQNEAQLEKS | |
| | RLLSDRFSAERPKGSFSTLEIQRTEQGDSAMYLCASSLVRLDGYTFGSGTRLTVVEDLNKVFP | |
| | PEVAVFEPSEAEISHTQKATLVCLATGFFPDHVELSWWVNGKEVHSGVSTDPQPLKEQPALND | |
| | SRYCLSSRLRVSATFWQNPRNHFRCQVQFYGLSENDEWTQDRAKPVTQIVSAEAWGRADCGFT | |
| | SVSYQQGVLSATILYEILLGKATLYAVLVSALVLMAMVKRKDF | |
| 458 | ATGGAAACTCTCCTGGGAGTGTCTTTGGTGATTCTATGGCTTCAACTGGCTAGGGTGAACAGT | TCR AD (nt) |
| | CAACAGGGAGAAGAGGATCCTCAGGCCTTGAGCATCCAGGAGGGTGAAAATGCCACCATGAAC | |
| | TGCAGTTACAAAACTAGTATAAACAATTTACAGTGGTATAGACAAAATTCAGGTAGAGGCCTT | |
| | GTCCACCTAATTTTAATACGTTCAAATGAAAGAGAGAAACACAGTGGAAGATTAAGAGTCACG | |
| | CTTGACACTTCCAAGAAAAGCAGTTCCTTGTTGATCACGGCTTCCCGGGCAGCAGACACTGCT | |
| | TCTTACTTCTGTGCTACGGTCCCGACTGACTACATGTATTCAGGAGGAGGTGCTGACGGACTC | |
| | ACCTTTGGCAAAGGGACTCATCTAATCATCCAGCCCTATATCCAGAACCCTGACCCTGCCGTG | |
| | TACCAGCTGAGAGACTCTAAATCCAGTGACAAGTCTGTCTGCCTATTCACCGATTTTGATTCT | |
| | CAAACAAATGTGTCACAAAGTAAGGATTCTGATGTGTATATCACAGACAAAACTGTGCTAGAC | |
| | ATGAGGTCTATGGACTTCAAGAGCAACAGTGCTGTGGCCTGGAGCAACAAATCTGACTTTGCA | |
| | TGTGCAAACGCCTTCAACAACAGCATTATTCCAGAAGACACCTTCTTCCCCAGCCCAGAAAGT | |
| | TCCTGTGATGTCAAGCTGGTCGAGAAAAGCTTTGAAACAGATACGAACCTAAACTTTCAAAAC | |
| | CTGTCAGTGATTGGGTTCCGAATCCTCCTCCTGAAAGTGGCCGGGTTTAATCTGCTCATGACG | |
| | CTGCGGCTGTGGTCCAGCGGCTCCGGAGCCACGAACTTCTCTCTGTTAAAGCAAGCAGGAGAC | |
| | GTGGAAGAAAACCCCGGTCCCATGGGCACCAGCCTCCTCTGCTGGATGGCCCTGTGTCTCCTG | |
| | GGGGCAGATCACGCAGATACTGGAGTCTCCCAGAACCCCAGACACAAGATCACAAAGAGGGGA | |
| | CAGAATGTAACTTTCAGGTGTGATCCAATTTCTGAACACAACCGCCTTTATTGGTACCGACAG | |
| | ACCCTGGGGCAGGGCCCAGAGTTTCTGACTTACTTCCAGAATGAAGCTCAACTAGAAAAATCA | |
| | AGGCTGCTCAGTGATCGGTTCTCTGCAGAGAGGCCTAAGGGATCTTTCTCCACCTTGGAGATC | |
| | CAGCGCACAGAGCAGGGGGACTCGGCCATGTATCTCTGTGCCAGCAGCTTAGTACGGTTGGAT | |
| | GGCTACACCTTCGGTTCGGGGACCAGGTTAACCGTTGTAGAGGACCTGAACAAGGTGTTCCCA | |
| | CCCGAGGTCGCTGTGTTTGAGCCATCAGAAGCAGAGATCTCCCACACCCAAAAGGCCACACTG | |
| | GTGTGCCTGGCCACAGGCTTCTTCCCCGACCACGTGGAGCTGAGCTGGTGGGTGAATGGGAAG | |
| | GAGGTGCACAGTGGGGTCAGCACGGACCCGCAGCCCCTCAAGGAGCAGCCCGCCCTCAATGAC | |
| | TCCAGATACTGCCTGAGCAGCCGCCTGAGGGTCTCGGCCACCTTCTGGCAGAACCCCCGCAAC | |
| | CACTTCCGCTGTCAAGTCCAGTTCTACGGGCTCTCGGAGAATGACGAGTGGACCCAGGATAGG | |
| | GCCAAACCCGTCACCCAGATCGTCAGCGCCGAGGCCTGGGGTAGAGCAGACTGTGGCTTTACC | |
| | TCGGTGTCCTACCAGCAAGGGGTCCTGTCTGCCACCATCCTCTATGAGATCCTGCTAGGGAAG | |
| | GCCACCCTGTATGCTGTGCTGGTCAGCGCCCTTGTGTTGATGGCCATGGTCAAGAGAAAGGAT | |
| | TTCTGA | |
| | α chain nucleotides: 1-846 | |
| | P2A nucleotides: 847-903 | |
| | ß chain nucleotides: 904-1833 | |
| 459 | AVRX₁X₂TSGTYKYI | TCR Vα CDR- |
| | X₁ is any amino acid | 3 |
| | X₂ is P, S, or T | |
| 460 | AVRX₃X₂TSGTYKYI | TCR Vα CDR- |
| | X₃ is D, E, S, T, N, Q, C, G, P, A, V, I, L, M, F, Y, or W X₂ | 3 |
| | is P, S, or T | |
| 461 | AVRX₄X₂TSGTYKYI | TCR Vα CDR- |
| | X₄ is G, A, C, S, T, V, D, or E | 3 |
| | X₂ is P, S, or T | |
| 462 | AVRGX₂TSGTYKYI | TCR Vα CDR- |
| | X₂ is P, S, or T | 3 |
| 463 | AVRX₁PTSGTYKYI | TCR Vα CDR- |
| | X₄ is G, A, C, S, T, V, D, or E | 3 |
| 464 | AVRGPTSGTYKYI | TCR Vα CDR- |
| | (see also SEQ ID NO: 65) | 3 |
| 465 | ASSX₅X₆X₇GX₈X₉QX₁₀ | TCR Vβ CDR- |
| | X₅ is L or F | 3 |
| | X₆ is V or L | |
| | X₇ is S, Q, N, or A | |
| | X₈ is N or E | |
| | X₉ is E or T | |
| | X₁₀ is F or Y | |
| 466 | ASSLVX₇GX₈X₉QX₁₀ | TCR Vβ CDR- |
| | X₇ is S, Q, N, or A X₈ is N or E | 3 |
| | X₉ is E or T | |
| | X₁₀ is F or Y | |
| 467 | ASSLVX₁₁GNEQF | TCR Vβ CDR- |
| | X₁₁ is S, Q, or N | 3 |
| 468 | ASSX₅X₆AGETQYF | TCR Vβ CDR- |
| | X₅ is L or F | 3 |
| | X₆ is V or L | |
| 469 | ASSLVSGNEQF | TCR Vβ CDR- |
| | | 3 |
| 470 | AVRCPTSGTYKYI | TCR AE Vα |
| | (Ala to Cys mutation at position 4 of the CDR3 sequence SEQ ID | CDR-3 |
| | NO: 51 and corresponding sequences SEQ ID NOs: 52, 53, 54, and 64) | |
| 471 | AVRSPTSGTYKYI | TCR AF Vα |
| | (Ala to Ser mutation at position 4 of the CDR3 sequence SEQ ID | CDR-3 |
| | NO: 51 and corresponding sequences SEQ ID NOs: 52, 53, 54, and 64) | |
| 472 | AVRTPTSGTYKYI | TCR AG Vα |
| | (Ala to Tyr mutation at position 4 of the CDR3 sequence SEQ I | CDR-3 |
| | NO: 51 and corresponding sequences SEQ ID NOs: 52, 53, 54, and 64) | |
| 473 | AVRVPTSGTYKYI | TCR AH Vα |
| | (Ala to Val mutation at position 4 of the CDR3 sequence SEQ ID | CDR-3 |
| | NO: 51 and corresponding sequences SEQ ID NOs: 52, 53, 54, and 64) | |
| 474 | AVREPTSGTYKYI | TCR AI Vα |
| | (Ala to Glu mutation at position 4 of the Vα CDR3 sequence SEQ ID | CDR-3 |
| | NO: 51 and corresponding SEQ ID NOs: 52, 53, 54, and 64) | |
| 475 | ASSLVNGNEQF | TCR AI Vβ |
| | (Ser to Asn mutation at position 6 of the Vβ CDR3 sequence of SEQ | CDR-3 |
| | ID NO: 57 and corresponding SEQ ID NO: 58, 59, 60, and 64) | |
| 476 | AVRX₁X₁TSGTYKYI | TCR Vα CDR- |
| | each X₁ is independently any amino acid | 3 |
| 477 | AVRX₁₂X₁₃TSGTYKYI | TCR Vα CDR- |
| | X₁₂ is A, I, L, V, P, G, C, M, S, T, D, or E | 3 |
| | X₁₃ is S, T, or P | |
| 478 | ASSX₁X₁X₁GX₁X₁QF | TCR Vβ CDR- |
| | each X₁ is independently any amino acid | 3 |
| 479 | ASSX₁₄X₁₅X₁₆GX₁₇X₁₈QF | TCR Vβ CDR- |
| | X₁₄ is A, I, L, V, P, G, F, Y, or W | 3 |
| | X₁₅ is A, I, L, V, P, or G | |
| | X₁₆ is S, T, A, I, L, V, P, G, N, or Q | |
| | X₁₇ is D, E, N, or Q | |
| | X₁₈ is D, E, S, or T | |
| 480 | AVHSNAGGTSYGKLT | TCR AJ Vα |
| | | CDR-3 |
| 481 | SGEDQVTQSPEALRLQEGESSSLNCSYTVSGLRGLFWYRQDPGKGPEFLFTLYSAGEEKEKER | TCR AI Vα |
| | LKATLTKKESFLHITAPKPEDSATYLCAVHSNAGGTSYGKLTFGQGTILTVHPN | (aa) |
| 482 | MEKMLECAFIVLWLQLGWLSGEDQVTQSPEALRLQEGESSSLNCSYTVSGLRGLFWYRQDPGK | TCR AJ Vα + |
| | GPEFLFTLYSAGEEKEKERLKATLTKKESFLHITAPKPEDSATYLCAVHSNAGGTSYGKLTFG | ss (aa) |
| | QGTILTVHPN | |
| 483 | MEKMLECAFIVLWLQLGWLSGEDQVTQSPEALRLQEGESSSLNCSYTVSGLRGLFWYRQDPGK | TCR AJ Vα + |
| | GPEFLFTLYSAGEEKEKERLKATLTKKESFLHITAPKPEDSATYLCAVHSNAGGTSYGKLTFG | Ca (aa) |
| | QGTILTVHPNIQNPDPAVYQLRDSKSSDKSVCLFTDFDSQTNVSQSKDSDVYITDKTVLDMRS | |
| | MDFKSNSAVAWSNKSDFACANAFNNSIIPEDTFFPSPESSCDVKLVEKSFETDTNLNFQNLSV | |
| | IGFRILLLKVAGENLLMTLRLWSS | |
| 484 | ASSADRGSPLH | TCR AJ Vβ |
| | | CDR-3 |
| 485 | DAGVTQSPTHLIKTRGQHVTLRCSPISGHKSVSWYQQVLGQGPQFIFQYYEKEERGRGNFPDR | TCR AJ Vβ |
| | FSARQFPNYSSELNVNALLLGDSALYLCASSADRGSPLHFGNGTRLTVTE | (aa) |
| 486 | MGPGLLCWVLLCLLGAGPVDAGVTQSPTHLIKTRGQHVTLRCSPISGHKSVSWYQQVLGQGPQ | TCR AJ Vβ + |
| | FIFQYYEKEERGRGNFPDRFSARQFPNYSSELNVNALLLGDSALYLCASSADRGSPLHFGNGT | ss (aa) |
| | RLTVTE | |
| 487 | MGPGLLCWVLLCLLGAGPVDAGVTQSPTHLIKTRGQHVTLRCSPISGHKSVSWYQQVLGQGPQ | TCR AJ Vβ + |
| | FIFQYYEKEERGRGNFPDRFSARQFPNYSSELNVNALLLGDSALYLCASSADRGSPLHFGNGT | Cß (aa) |
| | RLTVTEDLNKVFPPEVAVFEPSEAEISHTQKATLVCLATGFFPDHVELSWWVNGKEVHSGVST | |
| | DPQPLKEQPALNDSRYCLSSRLRVSATFWONPRNHFRCQVQFYGLSENDEWTQDRAKPVTQIV | |
| | SAEAWGRADCGFTSVSYQQGVLSATILYEILLGKATLYAVLVSALVLMAMVKRKDF | |
| 488 | MEKMLECAFIVLWLQLGWLSGEDQVTQSPEALRLQEGESSSLNCSYTVSGLRGLFWYRQDPGK | TCR AJ |
| | GPEFLFTLYSAGEEKEKERLKATLTKKESFLHITAPKPEDSATYLCAVHSNAGGTSYGKLTFG | protein |
| | QGTILTVHPNIQNPDPAVYQLRDSKSSDKSVCLFTDFDSQTNVSQSKDSDVYITDKTVLDMRS | |
| | MDFKSNSAVAWSNKSDFACANAFNNSIIPEDTFFPSPESSCDVKLVEKSFETDTNLNFQNLSV | |
| | IGFRILLLKVAGFNLLMTLRLWSSGSGATNFSLLKQAGDVEENPGPMGPGLLCWVLLCLLGAG | |
| | PVDAGVTQSPTHLIKTRGQHVTLRCSPISGHKSVSWYQQVLGQGPQFIFQYYEKEERGRGNFP | |
| | DRFSARQFPNYSSELNVNALLLGDSALYLCASSADRGSPLHFGNGTRLTVTEDLNKVFPPEVA | |
| | VFEPSEAEISHTQKATLVCLATGFFPDHVELSWWVNGKEVHSGVSTDPQPLKEQPALNDSRYC | |
| | LSSRLRVSATFWQNPRNHFRCQVQFYGLSENDEWTQDRAKPVTQIVSAEAWGRADCGFTSVSY | |
| | QQGVLSATILYEILLGKATLYAVLVSALVLMAMVKRKDF | |
| 489 | ATGGAGAAAATGTTGGAGTGTGCATTCATAGTCTTGTGGCTTCAGCTTGGCTGGTTGAGTGGA | TCR AJ (nt) |
| | GAAGACCAGGTGACGCAGAGTCCCGAGGCCCTGAGACTCCAGGAGGGAGAGAGTAGCAGTCTC | |
| | AACTGCAGTTACACAGTCAGCGGTTTAAGAGGGCTGTTCTGGTATAGGCAAGATCCTGGGAAA | |
| | GGCCCTGAATTCCTCTTCACCCTGTATTCAGCTGGGGAAGAAAAGGAGAAAGAAAGGCTAAAA | |
| | GCCACATTAACAAAGAAGGAAAGCTTTCTGCACATCACAGCCCCTAAACCTGAAGACTCAGCC | |
| | ACTTATCTCTGTGCTGTGCATTCTAATGCTGGTGGTACTAGCTATGGAAAGCTGACATTTGGA | |
| | CAAGGGACCATCTTGACTGTCCATCCAAATATCCAGAACCCTGACCCTGCCGTGTACCAGCTG | |
| | AGAGACTCTAAATCCAGTGACAAGTCTGTCTGCCTATTCACCGATTTTGATTCTCAAACAAAT | |
| | GTGTCACAAAGTAAGGATTCTGATGTGTATATCACAGACAAAACTGTGCTAGACATGAGGTCT | |
| | ATGGACTTCAAGAGCAACAGTGCTGTGGCCTGGAGCAACAAATCTGACTTTGCATGTGCAAAC | |
| | GCCTTCAACAACAGCATTATTCCAGAAGACACCTTCTTCCCCAGCCCAGAAAGTTCCTGTGAT | |
| | GTCAAGCTGGTCGAGAAAAGCTTTGAAACAGATACGAACCTAAACTTTCAAAACCTGTCAGTG | |
| | ATTGGGTTCCGAATCCTCCTCCTGAAAGTGGCCGGGTTTAATCTGCTCATGACGCTGCGGCTG | |
| | TGGTCCAGCGGCTCCGGAGCCACGAACTTCTCTCTGTTAAAGCAAGCAGGAGACGTGGAAGAA | |
| | AACCCCGGTCCCATGGGCCCTGGGCTCCTCTGCTGGGTGCTGCTTTGTCTCCTGGGAGCAGGC | |
| | CCAGTGGACGCTGGAGTCACCCAAAGTCCCACACACCTGATCAAAACGAGAGGACAGCACGTG | |
| | ACTCTGAGATGCTCTCCTATCTCTGGGCACAAGAGTGTGTCCTGGTACCAACAGGTCCTGGGT | |
| | CAGGGGCCCCAGTTTATCTTTCAGTATTATGAGAAAGAAGAGAGAGGAAGAGGAAACTTCCCT | |
| | GATCGATTCTCAGCTCGCCAGTTCCCTAACTATAGCTCTGAGCTGAATGTGAACGCCTTGTTG | |
| | CTGGGGGACTCGGCCCTGTATCTCTGTGCCAGCAGCGCCGACAGGGGGTCACCCCTCCACTTT | |
| | GGGAACGGGACCAGGCTCACTGTGACAGAGGACCTGAACAAGGTGTTCCCACCCGAGGTCGCT | |
| | GTGTTTGAGCCATCAGAAGCAGAGATCTCCCACACCCAAAAGGCCACACTGGTGTGCCTGGCC | |
| | ACAGGCTTCTTCCCCGACCACGTGGAGCTGAGCTGGTGGGTGAATGGGAAGGAGGTGCACAGT | |
| | GGGGTCAGCACGGACCCGCAGCCCCTCAAGGAGCAGCCCGCCCTCAATGACTCCAGATACTGC | |
| | CTGAGCAGCCGCCTGAGGGTCTCGGCCACCTTCTGGCAGAACCCCCGCAACCACTTCCGCTGT | |
| | CAAGTCCAGTTCTACGGGCTCTCGGAGAATGACGAGTGGACCCAGGATAGGGCCAAACCCGTC | |
| | ACCCAGATCGTCAGCGCCGAGGCCTGGGGTAGAGCAGACTGTGGCTTTACCTCGGTGTCCTAC | |
| | CAGCAAGGGGTCCTGTCTGCCACCATCCTCTATGAGATCCTGCTAGGGAAGGCCACCCTGTAT | |
| | GCTGTGCTGGTCAGCGCCCTTGTGTTGATGGCCATGGTCAAGAGAAAGGATTTCTGA | |
| | α chain nucleotides: 1-837 | |
| | P2A nucleotides: 838-894 | |
| | ß chain nucleotides: 895-1821 | |
| 490 | SGHKS | TCR AJ Vβ |
| | | CDR-1 |
| 491 | YYEKEE | TCR AJ Vβ |
| | | CDR-2 |

1. A pair of nucleic acid sequences encoding a T cell receptor (TCR) or antigen-binding fragment thereof that recognizes a minor histocompatibility antigen HA-1 peptide having the sequence VLHDDLLEA (SEQ ID NO:354), wherein the pair of nucleic acid sequences encode:
an alpha chain comprising a variable alpha (Vα) region and a beta chain comprising a variable beta (Vβ) region; or
a gamma chain comprising a variable gamma (Vγ) region and a delta chain comprising a variable delta (Vδ) region; wherein:
(a) the Vα or Vγ region comprises a complementarity determining region 3 (CDR-3) comprising SEQ ID NO:3, and the Vβ or Vδ region comprises a CDR-3 comprising SEQ ID NO:11;
(b) the Vα or Vγ region comprises a CDR-3 comprising SEQ ID NO:21, and the Vβ or Vδ region comprises a CDR-3 comprising SEQ ID NO:27;
(c) the Vα or Vγ region comprises a CDR-3 comprising SEQ ID NO:37, and the Vβ or Vδ region comprises a CDR-3 comprising SEQ ID NO:43;
(d) the Vα or Vγ region comprises a CDR-3 comprising SEQ ID NO:51, and the Vβ or Vδ region comprises a CDR-3 comprising SEQ ID NO:57;
(e) the Vα or Vγ region comprises a CDR-3 comprising SEQ ID NO:65, and the Vβ or Vδ region comprises a CDR-3 comprising SEQ ID NO:57;
(f) the Vα or Vγ region comprises a CDR-3 comprising SEQ ID NO:78, and the Vβ or Vδ region comprises a CDR-3 comprising SEQ ID NO:84;
(g) the Vα or Vγ region comprises a CDR-3 comprising SEQ ID NO:92, and the Vβ or Vδ region comprises a CDR-3 comprising SEQ ID NO:98;
(h) the Vα or Vγ region comprises a CDR-3 comprising SEQ ID NO: 106, and the Vβ or Vδ region comprises a CDR-3 comprising SEQ ID NO:112;
(i) the Vα or Vγ region comprises a CDR-3 comprising SEQ ID NO: 120, and the Vβ or Vδ region comprises a CDR-3 comprising SEQ ID NO:126;
(j) the Vα or Vγ region comprises a CDR-3 comprising SEQ ID NO:136, and the Vβ or Vδ region comprises a CDR-3 comprising SEQ ID NO:142;
(k) the Vα or Vγ region comprises a CDR-3 comprising SEQ ID NO: 152, and the Vβ or Vδ region comprises a CDR-3 comprising SEQ ID NO:158;
(1) the Vα or Vγ region comprises a CDR-3 comprising SEQ ID NO:166, and the Vβ or Vδ region comprises a CDR-3 comprising SEQ ID NO:172;
(m) the Vα or Vγ region comprises a CDR-3 comprising SEQ ID NO: 180, and the Vβ or Vδ region comprises a CDR-3 comprising SEQ ID NO:186;
(n) the Vα or Vγ region comprises a CDR-3 comprising SEQ ID NO: 194, and the Vβ or Vδ region comprises a CDR-3 comprising SEQ ID NO:200;
(o) the Vα or Vγ region comprises a CDR-3 comprising SEQ ID NO:208, and the Vβ or Vδ region comprises a CDR-3 comprising SEQ ID NO:214;
(p) the Vα or Vγ region comprises a CDR-3 comprising SEQ ID NO:224, and the Vβ or Vδ region comprises a CDR-3 comprising SEQ ID NO:230;
(q) the Vα or Vγ region comprises a CDR-3 comprising SEQ ID NO:238, and the Vβ or Vδ region comprises a CDR-3 comprising SEQ ID NO:244;
(r) the Vα or Vγ region comprises a CDR-3 comprising SEQ ID NO:252, and the Vβ or Vδ region comprises a CDR-3 comprising SEQ ID NO:258;
(s) the Vα or Vγ region comprises a CDR-3 comprising SEQ ID NO:268, and the Vβ or Vδ region comprises a CDR-3 comprising SEQ ID NO:158;
(t) the Vα or Vγ region comprises a CDR-3 comprising SEQ ID NO:278, and the Vβ or Vδ region comprises a CDR-3 comprising SEQ ID NO:284;
(u) the Vα or Vγ region comprises a CDR-3 comprising SEQ ID NO:359, and the Vβ or Vδ region comprises a CDR-3 comprising SEQ ID NO:363;
(v) the Vα or Vγ region comprises a CDR-3 comprising SEQ ID NO:369, and the Vβ or Vδ region comprises a CDR-3 comprising SEQ ID NO:373;
(w) the Vα or Vγ region comprises a CDR-3 comprising SEQ ID NO:379, and the Vβ or Vδ region comprises a CDR-3 comprising SEQ ID NO:383;
(x) the Vα or Vγ region comprises a CDR-3 comprising SEQ ID NO:389, and the Vβ or Vδ region comprises a CDR-3 comprising SEQ ID NO:393;
(y) the Vα or Vγ region comprises a CDR-3 comprising SEQ ID NO:399, and the Vβ or Vδ region comprises a CDR-3 comprising SEQ ID NO:403;
(z) the Vα or Vγ region comprises a CDR-3 comprising SEQ ID NO:409, and the Vβ or Vδ region comprises a CDR-3 comprising SEQ ID NO:413;
(aa) the Vα or Vγ region comprises a CDR-3 comprising SEQ ID NO:419, and the Vβ or Vδ region comprises a CDR-3 comprising SEQ ID NO:423;
(ab) the Vα or Vγ region comprises a CDR-3 comprising SEQ ID NO:429, and the Vβ or Vδ region comprises a CDR-3 comprising SEQ ID NO:433;
(ac) the Vα or Vγ region comprises a CDR-3 comprising SEQ ID NO:439, and the Vβ or Vδ region comprises a CDR-3 comprising SEQ ID NO:443;
(ad) the Vα or Vγ region comprises a CDR-3 comprising SEQ ID NO:449, and the Vβ or Vδ region comprises a CDR-3 comprising SEQ ID NO: 453;
(ae) the Vα or Vγ region comprises a CDR-3 comprising SEQ ID NO:480, and the Vβ or Vδ region comprises a CDR-3 comprising SEQ ID NO:484;
(af) the Vα or Vγ region comprises a complementarity determining region 3 (CDR-3) comprising SEQ ID NO:459, 460, 461, 462, 463, 464, 476, or 477, and the Vβ or Vo region comprises a CDR-3 comprising SEQ ID NO:465, 466, 467, 468, 469, 478, or 479;
(ag) the Vα or Vγ region comprises the CDR-3 comprising SEQ ID NO:463, and the Vβ or Vδ region comprises the CDR-3 comprising SEQ ID NO:469;
(ah) the Vα or Vγ region comprises a CDR-3 comprising SEQ ID NO:470, 471, 472, 473. and the Vβ or Vδ region comprises a CDR-3 comprising SEQ ID NO:57; or
(ai) the Vα or Vγ region comprises a CDR-3 comprising SEQ ID NO:474, and the Vβ or Vδ region comprises a CDR-3 comprising SEQ ID NO:475.

2. (canceled)

3. The pair of nucleic acid sequences of claim 1, wherein:
(a) the Vα or Vγ region comprises a complementarity determining region 1 (CDR-1) comprising SEQ ID NO: 1, a complementarity determining region 2 (CDR-2) comprising SEQ ID NO:2, and a complementarity determining region 3 (CDR-3) comprising SEQ ID NO:3, and the Vβ or Vδ region comprises a CDR-1 comprising SEQ ID NO:9, a CDR-2 comprising SEQ ID NO:10, and a CDR-3 comprising SEQ ID NO:11;
(b) the Vα or Vγ region comprises a CDR-1 comprising SEQ ID NO: 19, a CDR-2 comprising SEQ ID NO:20, and a CDR-3 comprising SEQ ID NO:21, and the Vβ or Vδ region comprises a CDR-1 comprising SEQ ID NO:9, a CDR-2 comprising SEQ ID NO:10, and a CDR-3 comprising SEQ ID NO:27;
(c) the Vα or Vγ region comprises a CDR-1 comprising SEQ ID NO:35, a CDR-2 comprising SEQ ID NO:36, and a CDR-3 comprising SEQ ID NO:37, and the Vβ or Vδ region comprises a CDR-1 comprising SEQ ID NO:9, a CDR-2 comprising SEQ ID NO:10, and a CDR-3 comprising SEQ ID NO:43;
(d) the Vα or Vγ region comprises a CDR-1 comprising SEQ ID NO:1, a CDR-2 comprising SEQ ID NO:2, and a CDR-3 comprising SEQ ID NO:51, and the Vβ or Vδ region comprises a CDR-1 comprising SEQ ID NO:9, a CDR-2 comprising SEQ ID NO:10, and a CDR-3 comprising SEQ ID NO:57;
(e) the Vα or Vγ region comprises a CDR-1 comprising SEQ ID NO:1, a CDR-2 comprising SEQ ID NO:2, and a CDR-3 comprising SEQ ID NO:65, and the Vβ or Vδ region comprises a CDR-1 comprising SEQ ID NO:9, a CDR-2 comprising SEQ ID NO:10, and a CDR-3 comprising SEQ ID NO:57;
(f) the Vα or Vγ region comprises a CDR-1 comprising SEQ ID NO:76, a CDR-2 comprising SEQ ID NO:77, and a CDR-3 comprising SEQ ID NO:78, and the Vβ or Vδ region comprises a CDR-1 comprising SEQ ID NO:9, a CDR-2 comprising SEQ ID NO:10, and a CDR-3 comprising SEQ ID NO:84;
(g) the Vα or Vγ region comprises a CDR-1 comprising SEQ ID NO:19, a CDR-2 comprising SEQ ID NO:20, and a CDR-3 comprising SEQ ID NO:92, and the Vβ or Vδ region comprises a CDR-1 comprising SEQ ID NO:9, a CDR-2 comprising SEQ ID NO:10, and a CDR-3 comprising SEQ ID NO:98;
(h) the Vα or Vγ region comprises a CDR-1 comprising SEQ ID NO:76, a CDR-2 comprising SEQ ID NO:77, and a CDR-3 comprising SEQ ID NO:106, and the Vβ or Vδ region comprises a CDR-1 comprising SEQ ID NO:9, a CDR-2 comprising SEQ ID NO:10, and a CDR-3 comprising SEQ ID NO:112;
(i) the Vα or Vγ region comprises a CDR-1 comprising SEQ ID NO:35, a CDR-2 comprising SEQ ID NO:36, and a CDR-3 comprising SEQ ID NO: 120, and the Vβ or Vδ region comprises a CDR-1 comprising SEQ ID NO:9, a CDR-2 comprising SEQ ID NO:10, and a CDR-3 comprising SEQ ID NO:126;
(j) the Vα or Vγ region comprises a CDR-1 comprising SEQ ID NO:134, a CDR-2 comprising SEQ ID NO: 135, and a CDR-3 comprising SEQ ID NO: 136, and the Vβ or Vδ region comprises a CDR-1 comprising SEQ ID NO:9, a CDR-2 comprising SEQ ID NO:10, and a CDR-3 comprising SEQ ID NO:142;
(k) the Vα or Vγ region comprises a CDR-1 comprising SEQ ID NO:150, a CDR-2 comprising SEQ ID NO: 151, and a CDR-3 comprising SEQ ID NO: 152, and the Vβ or Vδ region comprises a CDR-1 comprising SEQ ID NO:9, a CDR-2 comprising SEQ ID NO:10, and a CDR-3 comprising SEQ ID NO:158;
(l) the Vα or Vγ region comprises a CDR-1 comprising SEQ ID NO:35, a CDR-2 comprising SEQ ID NO:36, and a CDR-3 comprising SEQ ID NO:166, and the Vβ or Vδ region comprises a CDR-1 comprising SEQ ID NO:9, a CDR-2 comprising SEQ ID NO:10, and a CDR-3 comprising SEQ ID NO:172;
(m) the Vα or Vγ region comprises a CDR-1 comprising SEQ ID NO:35, a CDR-2 comprising SEQ ID NO:36, and a CDR-3 comprising SEQ ID NO:180, and the Vβ or Vδ region comprises a CDR-1 comprising SEQ ID NO:9, a CDR-2 comprising SEQ ID NO:10, and a CDR-3 comprising SEQ ID NO:186;
(n) the Vα or Vγ region comprises a CDR-1 comprising SEQ ID NO:76, a CDR-2 comprising SEQ ID NO: 77, and a CDR-3 comprising SEQ ID NO: 194, and the Vβ or Vδ region comprises a CDR-1 comprising SEQ ID NO:9, a CDR-2 comprising SEQ ID NO:10, and a CDR-3 comprising SEQ ID NO:200;
(o) the Vα or Vγ region comprises a CDR-1 comprising SEQ ID NO:76, a CDR-2 comprising SEQ ID NO:77, and a CDR-3 comprising SEQ ID NO:208, and the Vβ or Vδ region comprises a CDR-1 comprising SEQ ID NO:9, a CDR-2 comprising SEQ ID NO:10, and a CDR-3 comprising SEQ ID NO:214;
(p) the Vα or Vγ region comprises a CDR-1 comprising SEQ ID NO:222, a CDR-2 comprising SEQ ID NO:223, and a CDR-3 comprising SEQ ID NO:224, and the Vβ or Vδ region comprises a CDR-1 comprising SEQ ID NO:9, a CDR-2 comprising SEQ ID NO:10, and a CDR-3 comprising SEQ ID NO:230;
(q) the Vα or Vγ region comprises a CDR-1 comprising SEQ ID NO:76, a CDR-2 comprising SEQ ID NO:77, and a CDR-3 comprising SEQ ID NO:238, and the Vβ or Vδ region comprises a CDR-1 comprising SEQ ID NO:9, a CDR-2 comprising SEQ ID NO:10, and a CDR-3 comprising SEQ ID NO:244;
(r) the Vα or Vγ region comprises a CDR-1 comprising SEQ ID NO:19, a CDR-2 comprising SEQ ID NO:20, and a CDR-3 comprising SEQ ID NO:252, and the Vβ or Vδ region comprises a CDR-1 comprising SEQ ID NO:9, a CDR-2 comprising SEQ ID NO:10, and a CDR-3 comprising SEQ ID NO:258;
(s) the Vα or Vγ region comprises a CDR-1 comprising SEQ ID NO:266, a CDR-2 comprising SEQ ID NO:267, and a CDR-3 comprising SEQ ID NO:268, and the Vβ or Vδ region comprises a CDR-1 comprising SEQ ID NO:9, a CDR-2 comprising SEQ ID NO:10, and a CDR-3 comprising SEQ ID NO: 158; (t) the Vα or Vγ region comprises a CDR-1 comprising SEQ ID NO: 19, a CDR-2 comprising SEQ ID NO:20, and a CDR-3 comprising SEQ ID NO:278, and the Vβ or Vδ region comprises a CDR-1 comprising SEQ ID NO:9, a CDR-2 comprising SEQ ID NO:10, and a CDR-3 comprising SEQ ID NO:284;
(u) the Vα or Vγ region comprises a CDR-1, a CDR-2, and a CDR-3 comprising a CDR-1, a CDR-2, and a CDR-3, respectively, contained within the Vα or Vγ region sequence of SEQ ID NO:360, and the Vβ or Vδ region comprises a CDR-1, a CDR-2, and a CDR-3 comprising a CDR-1, a CDR-2, and a CDR-3, respectively, contained within the Vβ or Vδ region sequence of SEQ ID NO:364;
(v) the Vα or Vγ region comprises a CDR-1, a CDR-2, and a CDR-3 comprising a CDR-1, a CDR-2, and a CDR-3, respectively, contained within the Vα or Vγ region sequence of SEQ ID NO:370, and the Vβ or Vδ region comprises a CDR-1, a CDR-2, and a CDR-3 comprising a CDR-1, a CDR-2, and a CDR-3, respectively, contained within the Vβ or Vδ region sequence of SEQ ID NO:374;
(w) the Vα or Vγ region comprises a CDR-1, a CDR-2, and a CDR-3 comprising a CDR-1, a CDR-2, and a CDR-3, respectively, contained within the Vα or Vγ region sequence of SEQ ID NO:380, and the Vβ or Vδ region comprises a CDR-1, a CDR-2, and a CDR-3 comprising a CDR-1, a CDR-2, and a CDR-3, respectively, contained within the Vβ or Vδ region sequence of SEQ ID NO:384;
(x) the Vα or Vγ region comprises a CDR-1, a CDR-2, and a CDR-3 comprising a CDR-1, a CDR-2, and a CDR-3, respectively, contained within the Vα or Vγ region sequence of SEQ ID NO:390, and the Vβ or Vδ region comprises a CDR-1, a CDR-2, and a CDR-3 comprising a CDR-1, a CDR-2, and a CDR-3, respectively, contained within the Vβ or Vδ region sequence of SEQ ID NO:394;
(y) the Vα or Vγ region comprises a CDR-1, a CDR-2, and a CDR-3 comprising a CDR-1, a CDR-2, and a CDR-3, respectively, contained within the Vα or Vγ region sequence of SEQ ID NO:400, and the Vβ or Vo region comprises a CDR-1, a CDR-2, and a CDR-3 comprising a CDR-1, a CDR-2, and a CDR-3, respectively, contained within the Vβ or Vδ region sequence of SEQ ID NO:404;
(z) the Vα or Vγ region comprises a CDR-1, a CDR-2, and a CDR-3 comprising a CDR-1, a CDR-2, and a CDR-3, respectively, contained within the Vα or Vγ region sequence of SEQ ID NO:410, and the Vβ or Vδ region comprises a CDR-1, a CDR-2, and a CDR-3 comprising a CDR-1, a CDR-2, and a CDR-3, respectively, contained within the Vβ or Vδ region sequence of SEQ ID NO:414;
(aa) the Vα or Vγ region comprises a CDR-1, a CDR-2, and a CDR-3 comprising a CDR-1, a CDR-2, and a CDR-3, respectively, contained within the Vα or Vγ region sequence of SEQ ID NO:420, and the Vβ or Vδ region comprises a CDR-1, a CDR-2, and a CDR-3 comprising a CDR-1, a CDR-2, and a CDR-3, respectively, contained within the Vβ or Vδ region sequence of SEQ ID NO:424;
(ab) the Vα or Vγ region comprises a CDR-1, a CDR-2, and a CDR-3 comprising a CDR-1, a CDR-2, and a CDR-3, respectively, contained within the Vα or Vγ region sequence of SEQ ID NO:430, and the Vβ or Vδ region comprises a CDR-1, a CDR-2, and a CDR-3 comprising a CDR-1, a CDR-2, and a CDR-3, respectively, contained within the Vβ or Vδ region sequence of SEQ ID NO:434;
(ac) the Vα or Vγ region comprises a CDR-1, a CDR-2, and a CDR-3 comprising a CDR-1, a CDR-2, and a CDR-3, respectively, contained within the Vα or Vγ region sequence of SEQ ID NO:440, and the Vβ or Vδ region comprises a CDR-1, a CDR-2, and a CDR-3 comprising a CDR-1, a CDR-2, and a CDR-3, respectively, contained within the Vβ or Vδ region sequence of SEQ ID NO:444;
(ad) the Vα or Vγ region comprises a CDR-1, a CDR-2, and a CDR-3 comprising a CDR-1, a CDR-2, and a CDR-3, respectively, contained within the Vα or Vγ region sequence of SEQ ID NO:450, and the Vβ or Vδ region comprises a CDR-1, a CDR-2, and a CDR-3 comprising a CDR-1, a CDR-2, and a CDR-3, respectively, contained within the Vβ or Vδ region sequence of SEQ ID NO:454;
(ae) the Vα or Vγ region comprises a CDR-1, a CDR-2, and a CDR-3 comprising a CDR-1, a CDR-2, and a CDR-3, respectively, contained within the Vα or Vγ region sequence of SEQ ID NO:481, and the Vβ or Vδ region comprises a CDR-1, a CDR-2, and a CDR-3 comprising a CDR-1, a CDR-2, and a CDR-3, respectively, contained within the Vβ or Vδ region sequence of SEQ ID NO:485; or
(af) the Vα or Vγ region comprises
(i) a CDR-1 comprising SEQ ID NO:1, and a CDR-2 comprising SEQ ID NO:2;
(ii) a CDR-1 comprising SEQ ID NO:19, and a CDR-2 comprising SEQ ID NO:20;
(iii) a CDR-1 comprising SEQ ID NO:35, and a CDR-2 comprising SEQ ID NO:36;
(iv) a CDR-1 comprising SEQ ID NO:76, and a CDR-2 comprising SEQ ID NO:77;
(v) a CDR-1 comprising SEQ ID NO: 134, and a CDR-2 comprising SEQ ID NO:135;
(vi) a CDR-1 comprising SEQ ID NO:150, and a CDR-2 comprising SEQ ID NO: 151;
(vii) a CDR-1 comprising SEQ ID NO:222, and a CDR-2 comprising SEQ ID NO:223; or
(viii) a CDR-1 comprising SEQ ID NO:266, and a CDR-2 comprising SEQ ID NO:267; and
a CDR3 SEQ ID NO:459, 460, 461, 462, 463, 464, 476, or 477, and the the Vβ or Vδ region comprises a CDR-1 comprising SEQ ID NO:9, and a CDR-2 comprising SEQ ID NO: 10 and a CDR3 comprising SEQ ID NO:465, 466, 467, 468, 469, 478, or 479.

4-6. (canceled)

7. The pair of nucleic acid sequences of claim 1, wherein:
(a) the Vα or Vγ region comprises SEQ ID NO:4 or a sequence that has at least 90% sequence identity thereto, and the Vβ or Vδ region comprises SEQ ID NO: 12 or a sequence that has at least 90% sequence identity thereto;
(b) the Vα or Vγ region comprises SEQ ID NO:22 or a sequence that has at least 90% sequence identity thereto, and the Vβ or Vδ region comprises SEQ ID NO:28 or a sequence that has at least 90% sequence identity thereto;
(c) the Vα or Vγ region comprises SEQ ID NO:38 or a sequence that has at least 90% sequence identity thereto, and the Vβ or Vδ region comprises SEQ ID NO:44 or a sequence that has at least 90% sequence identity thereto;
(d) the Vα or Vγ region comprises SEQ ID NO:52 or a sequence that has at least 90% sequence identity thereto, and the Vβ or Vδ region comprises SEQ ID NO:58 or a sequence that has at least 90% sequence identity thereto;
(e) the Vα or Vγ region comprises SEQ ID NO:66 or a sequence that has at least 90% sequence identity thereto, and the Vβ or Vδ region comprises SEQ ID NO:58 or a sequence that has at least 90% sequence identity thereto;
(f) the Vα or Vγ region comprises SEQ ID NO:79 or a sequence that has at least 90% sequence identity thereto, and the Vβ or Vδ region comprises SEQ ID NO:85 or a sequence that has at least 90% sequence identity thereto;
(g) the Vα or Vγ region comprises SEQ ID NO:93 or a sequence that has at least 90% sequence identity thereto, and the Vβ or Vδ region comprises SEQ ID NO:99 or a sequence that has at least 90% sequence identity thereto;
(h) the Vα or Vγ region comprises SEQ ID NO: 107 or a sequence that has at least 90% sequence identity thereto, and the Vβ or Vδ region comprises SEQ ID NO: 113 or a sequence that has at least 90% sequence identity thereto;
(i) the Vα or Vγ region comprises SEQ ID NO: 121 or a sequence that has at least 90% sequence identity thereto, and the Vβ or Vδ region comprises SEQ ID NO: 127 or a sequence that has at least 90% sequence identity thereto;
(j) the Vα or Vγ region comprises SEQ ID NO: 137 or a sequence that has at least 90% sequence identity thereto, and the Vβ or Vδ region comprises SEQ ID NO: 143 or a sequence that has at least 90% sequence identity thereto;
(k) the Vα or Vγ region comprises SEQ ID NO: 153 or a sequence that has at least 90% sequence identity thereto, and the Vβ or Vδ region comprises SEQ ID NO: 159 or a sequence that has at least 90% sequence identity thereto;
(l) the Vα or Vγ region comprises SEQ ID NO: 167 or a sequence that has at least 90% sequence identity thereto, and the Vβ or Vδ region comprises SEQ ID NO: 173 or a sequence that has at least 90% sequence identity thereto;
(m) the Vα or Vγ region comprises SEQ ID NO: 181 or a sequence that has at least 90% sequence identity thereto, and the Vβ or Vδ region comprises SEQ ID NO: 187 or a sequence that has at least 90% sequence identity thereto;
(n) the Vα or Vγ region comprises SEQ ID NO: 195 or a sequence that has at least 90% sequence identity thereto, and the Vβ or Vδ region comprises SEQ ID NO:201 or a sequence that has at least 90% sequence identity thereto;
(o) the Vα or Vγ region comprises SEQ ID NO:209 or a sequence that has at least 90% sequence identity thereto, and the Vβ or Vδ region comprises SEQ ID NO:215 or a sequence that has at least 90% sequence identity thereto;
(p) the Vα or Vγ region comprises SEQ ID NO:225 or a sequence that has at least 90% sequence identity thereto, and the Vβ or Vδ region comprises SEQ ID NO:231 or a sequence that has at least 90% sequence identity thereto;
(q) the Vα or Vγ region comprises SEQ ID NO:239 or a sequence that has at least 90% sequence identity thereto, and the Vβ or Vδ region comprises SEQ ID NO:245 or a sequence that has at least 90% sequence identity thereto;
(r) the Vα or Vγ region comprises SEQ ID NO:253 or a sequence that has at least 90% sequence identity thereto, and the Vβ or Vδ region comprises SEQ ID NO:259 or a sequence that has at least 90% sequence identity thereto;
(s) the Vα or Vγ region comprises SEQ ID NO:269 or a sequence that has at least 90% sequence identity thereto, and the Vβ or Vδ region comprises SEQ ID NO: 159 or a sequence that has at least 90% sequence identity thereto;
(t) the Vα or Vγ region comprises SEQ ID NO:279 or a sequence that has at least 90% sequence identity thereto, and the Vβ or Vδ region comprises SEQ ID NO:285 or a sequence that has at least 90% sequence identity thereto;
(u) the Vα or Vγ region comprises SEQ ID NO:360 or a sequence that has at least 90% sequence identity thereto, and the Vβ or Vδ region comprises SEQ ID NO:364 or a sequence that has at least 90% sequence identity thereto;
(v) the Vα or Vγ region comprises SEQ ID NO:370 or a sequence that has at least 90% sequence identity thereto, and the Vβ or Vδ region comprises SEQ ID NO:374 or a sequence that has at least 90% sequence identity thereto;
(w) the Vα or Vγ region comprises SEQ ID NO:380 or a sequence that has at least 90% sequence identity thereto, and the Vβ or Vδ region comprises SEQ ID NO:384 or a sequence that has at least 90% sequence identity thereto;
(x) the Vα or Vγ region comprises SEQ ID NO:390 or a sequence that has at least 90% sequence identity thereto, and the Vβ or Vδ region comprises SEQ ID NO:394 or a sequence that has at least 90% sequence identity thereto;
(y) the Vα or Vγ region comprises SEQ ID NO:400 or a sequence that has at least 90% sequence identity thereto, and the Vβ or Vδ region comprises SEQ ID NO:404 or a sequence that has at least 90% sequence identity thereto;
(z) the Vα or Vγ region comprises SEQ ID NO:410 or a sequence that has at least 90% sequence identity thereto, and the Vβ or Vδ region comprises SEQ ID NO:414 or a sequence that has at least 90% sequence identity thereto;
(aa) the Vα or Vγ region comprises SEQ ID NO:420 or a sequence that has at least 90% sequence identity thereto, and the Vβ or Vδ region comprises SEQ ID NO:424 or a sequence that has at least 90% sequence identity thereto;
(ab) the Vα or Vγ region comprises SEQ ID NO:430 or a sequence that has at least 90% sequence identity thereto, and the Vβ or Vδ region comprises SEQ ID NO:434 or a sequence that has at least 90% sequence identity thereto;
(ac) the Vα or Vγ region comprises SEQ ID NO:440 or a sequence that has at least 90% sequence identity thereto, and the Vβ or Vδ region comprises SEQ ID NO:444 or a sequence that has at least 90% sequence identity thereto;
(ad) the Vα or Vγ region comprises SEQ ID NO:450 or a sequence that has at least 90% sequence identity thereto, and the Vβ or Vδ region comprises SEQ ID NO:454 or a sequence that has at least 90% sequence identity thereto; or
(ae) the Vα or Vγ region comprises SEQ ID NO:481 or a sequence that has at least 90% sequence identity thereto, and the Vβ or Vδ region comprises SEQ ID NO:485 or a sequence that has at least 90% sequence identity thereto.

8-12. (canceled)

13. The pair of nucleic acid sequences of claim 1, wherein:
the alpha chain further comprises an alpha constant (Cα) region and the beta chain further comprises a beta constant (Cβ) region; or
the gamma chain further comprises an gamma constant (Cγ) region and the delta chain further comprises a delta constant (Cδ) region.

14. The pair of nucleic acid sequences of claim 13, wherein the Cα comprises SEQ ID NO: 294 or 296 and the Cβ comprises SEQ ID NO: 297 or 299.

15. The pair of nucleic acid sequences of claim 14, wherein:
(a) the alpha or gamma chain comprises SEQ ID NO:6, and the beta or delta chain comprises SEQ ID NO:14;
(b) the alpha or gamma chain comprises SEQ ID NO:24, and the beta or delta chain comprises SEQ ID NO:30;
(c) the alpha or gamma chain comprises SEQ ID NO:40, and the beta or delta chain comprises SEQ ID NO:46;
(d) the alpha or gamma chain comprises SEQ ID NO:54, and the beta or delta chain comprises SEQ ID NO:60;
(e) the alpha or gamma chain comprises SEQ ID NO:68, and the beta or delta chain comprises SEQ ID NO:71;
(f) the alpha or gamma chain comprises SEQ ID NO:81, and the beta or delta chain comprises SEQ ID NO:87;
(g) the alpha or gamma chain comprises SEQ ID NO:95, and the beta or delta chain comprises SEQ ID NO:101;
(h) the alpha or gamma chain comprises SEQ ID NO:109, and the beta or delta chain comprises SEQ ID NO:115;
(i) the alpha or gamma chain comprises SEQ ID NO:123, and the beta or delta chain comprises SEQ ID NO:129;
(j) the alpha or gamma chain comprises SEQ ID NO:139, and the beta or delta chain comprises SEQ ID NO:145;
(k) the alpha or gamma chain comprises SEQ ID NO:155, and the beta or delta chain comprises SEQ ID NO:161;
(l) the alpha or gamma chain comprises SEQ ID NO:169, and the beta or delta chain comprises SEQ ID NO:175;
(m) the alpha or gamma chain comprises SEQ ID NO:183, and the beta or delta chain comprises SEQ ID NO:189;
(n) the alpha or gamma chain comprises SEQ ID NO:197, and the beta or delta chain comprises SEQ ID NO:203;
(o) the alpha or gamma chain comprises SEQ ID NO:211, and the beta or delta chain comprises SEQ ID NO:217;
(p) the alpha or gamma chain comprises SEQ ID NO:227, and the beta or delta chain comprises SEQ ID NO:233;
(q) the alpha or gamma chain comprises SEQ ID NO:241, and the beta or delta chain comprises SEQ ID NO:247;
(r) the alpha or gamma chain comprises SEQ ID NO:255, and the beta or delta chain comprises SEQ ID NO:261;
(s) the alpha or gamma chain comprises SEQ ID NO:271, and the beta or delta chain comprises SEQ ID NO:161;
(t) the alpha or gamma chain comprises SEQ ID NO:281, and the beta or delta chain comprises SEQ ID NO:287;
(u) the alpha or gamma chain comprises SEQ ID NO:362, and the beta or delta chain comprises SEQ ID NO:366;
(v) the alpha or gamma chain comprises SEQ ID NO:372, and the beta or delta chain comprises SEQ ID NO:376;
(w) the alpha or gamma chain comprises SEQ ID NO:382, and the beta or delta chain comprises SEQ ID NO:386;
(x) the alpha or gamma chain comprises SEQ ID NO:392, and the beta or delta chain comprises SEQ ID NO:396;
(y) the alpha or gamma chain comprises SEQ ID NO:402, and the beta or delta chain comprises SEQ ID NO:406;
(z) the alpha or gamma chain comprises SEQ ID NO:412, and the beta or delta chain comprises SEQ ID NO:416;
(aa) the alpha or gamma chain comprises SEQ ID NO:422, and the beta or delta chain comprises SEQ ID NO:426;
(ab) the alpha or gamma chain comprises SEQ ID NO:432, and the beta or delta chain comprises SEQ ID NO:436;
(ac) the alpha or gamma chain comprises SEQ ID NO:442, and the beta or delta chain comprises SEQ ID NO:446;
(ad) the alpha or gamma chain comprises SEQ ID NO:452, and the beta or delta chain comprises SEQ ID NO:456; or
(ae) the alpha or gamma chain comprises SEQ ID NO:483, and the beta or delta chain comprises SEQ ID NO:487.

16. The pair of nucleic acid sequences of claim 1, wherein the encoded TCR or antigen-binding fragment thereof recognizes HA-1 in the context of a human leukocyte antigens (HLA)-A molecule of serotype HLA-A*02:01 or HLA-A*02:06.

17-20. (canceled)

21. The pair of nucleic acid sequences of claim 1, wherein the TCR or antigen-binding fragment thereof recognizes the peptide having the sequence VLHDDLLEA (SEQ ID NO:354) with higher affinity than a peptide having the sequence VLRDDLLEA (SEQ ID NO:355).

22. (canceled)

23. The pair of nucleic acid sequences of claim 1, wherein the nucleic acid comprises:
(a) a nucleotide sequence encoding the Vα or Vγ region comprises SEQ ID NO:7 or a sequence that has at least 90% sequence identity thereto, and a nucleotide sequence encoding the Vβ or Vδ region comprises SEQ ID NO: 15 or a sequence that has at least 90% sequence identity thereto;
(b) a nucleotide sequence encoding the Vα or Vγ region comprises SEQ ID NO:25 or a sequence that has at least 90% sequence identity thereto, and a nucleotide sequence encoding the Vβ or Vδ region comprises SEQ ID NO:31 or a sequence that has at least 90% sequence identity thereto;
(c) a nucleotide sequence encoding the Vα or Vγ region comprises SEQ ID NO:41 or a sequence that has at least 90% sequence identity thereto, and a nucleotide sequence encoding the Vβ or Vδ region comprises SEQ ID NO:47 or a sequence that has at least 90% sequence identity thereto;
(d) a nucleotide sequence encoding the Vα or Vγ region comprises SEQ ID NO:55 or a sequence that has at least 90% sequence identity thereto, and a nucleotide sequence encoding the Vβ or Vδ region comprises SEQ ID NO:61 or a sequence that has at least 90% sequence identity thereto;
(e) a nucleotide sequence encoding the Vα or Vγ region comprises SEQ ID NO:69 or a sequence that has at least 90% sequence identity thereto, and a nucleotide sequence encoding the Vβ or Vδ region comprises SEQ ID NO:72 or a sequence that has at least 90% sequence identity thereto;
(f) a nucleotide sequence encoding the Vα or Vγ region comprises SEQ ID NO:82 or a sequence that has at least 90% sequence identity thereto, and a nucleotide sequence encoding the Vβ or Vδ region comprises SEQ ID NO:88 or a sequence that has at least 90% sequence identity thereto;
(g) a nucleotide sequence encoding the Vα or Vγ region comprises SEQ ID NO:96 or a sequence that has at least 90% sequence identity thereto, and a nucleotide sequence encoding the Vβ or Vδ region comprises SEQ ID NO: 102 or a sequence that has at least 90% sequence identity thereto;
(h) a nucleotide sequence encoding the Vα or Vγ region comprises SEQ ID NO:110 or a sequence that has at least 90% sequence identity thereto, and a nucleotide sequence encoding the Vβ or Vδ region comprises SEQ ID NO: 116 or a sequence that has at least 90% sequence identity thereto;
(i) a nucleotide sequence encoding the Vα or Vγ region comprises SEQ ID NO:124 or a sequence that has at least 90% sequence identity thereto, and a nucleotide sequence encoding the Vβ or Vδ region comprises SEQ ID NO:130 or a sequence that has at least 90% sequence identity thereto;
(j) a nucleotide sequence encoding the Vα or Vγ region comprises SEQ ID NO:140 or a sequence that has at least 90% sequence identity thereto, and a nucleotide sequence encoding the Vβ or Vδ region comprises SEQ ID NO: 146 or a sequence that has at least 90% sequence identity thereto;
(k) a nucleotide sequence encoding the Vα or Vγ region comprises SEQ ID NO:156 or a sequence that has at least 90% sequence identity thereto, and a nucleotide sequence encoding the Vβ or Vδ region comprises SEQ ID NO: 162 or a sequence that has at least 90% sequence identity thereto;
(l) a nucleotide sequence encoding the Vα or Vγ region comprises SEQ ID NO:170 or a sequence that has at least 90% sequence identity thereto, and a nucleotide sequence encoding the Vβ or Vδ region comprises SEQ ID NO: 176 or a sequence that has at least 90% sequence identity thereto;
(m) a nucleotide sequence encoding the Vα or Vγ region comprises SEQ ID NO:184 or a sequence that has at least 90% sequence identity thereto, and a nucleotide sequence encoding the Vβ or Vδ region comprises SEQ ID NO:190 or a sequence that has at least 90% sequence identity thereto;
(n) a nucleotide sequence encoding the Vα or Vγ region comprises SEQ ID NO:198 or a sequence that has at least 90% sequence identity thereto, and a nucleotide sequence encoding the Vβ or Vδ region comprises SEQ ID NO:204 or a sequence that has at least 90% sequence identity thereto;
(o) a nucleotide sequence encoding the Vα or Vγ region comprises SEQ ID NO:212 or a sequence that has at least 90% sequence identity thereto, and a nucleotide sequence encoding the Vβ or Vδ region comprises SEQ ID NO:218 or a sequence that has at least 90% sequence identity thereto;
(p) a nucleotide sequence encoding the Vα or Vγ region comprises SEQ ID NO:228 or a sequence that has at least 90% sequence identity thereto, and a nucleotide sequence encoding the Vβ or Vδ region comprises SEQ ID NO:234 or a sequence that has at least 90% sequence identity thereto;
(q) a nucleotide sequence encoding the Vα or Vγ region comprises SEQ ID NO:242 or a sequence that has at least 90% sequence identity thereto, and a nucleotide sequence encoding the Vβ or Vδ region comprises SEQ ID NO:248 or a sequence that has at least 90% sequence identity thereto;
(r) a nucleotide sequence encoding the Vα or Vγ region comprises SEQ ID NO:256 or a sequence that has at least 90% sequence identity thereto, and a nucleotide sequence encoding the Vβ or Vδ region comprises SEQ ID NO:262 or a sequence that has at least 90% sequence identity thereto;
(s) a nucleotide sequence encoding the Vα or Vγ region comprises SEQ ID NO:272 or a sequence that has at least 90% sequence identity thereto, and a nucleotide sequence encoding the Vβ or Vδ region comprises SEQ ID NO:274 or a sequence that has at least 90% sequence identity thereto;
(t) a nucleotide sequence encoding the Vα or Vγ region comprises SEQ ID NO:282 or a sequence that has at least 90% sequence identity thereto, and a nucleotide sequence encoding the Vβ or Vδ region comprises SEQ ID NO:288 or a sequence that has at least 90% sequence identity thereto;
(u) a nucleotide sequence encoding the Vα or Vγ region comprises SEQ ID NO:301, and a nucleotide sequence encoding the Vβ or Vδ region comprises SEQ ID NO:321;
(v) a nucleotide sequence encoding the Vα or Vγ region comprises SEQ ID NO:302, and a nucleotide sequence encoding the Vβ or Vδ region comprises SEQ ID NO:322;
(w) a nucleotide sequence encoding the Vα or Vγ region comprises SEQ ID NO:303, and a nucleotide sequence encoding the Vβ or Vδ region comprises SEQ ID NO:323;
(x) a nucleotide sequence encoding the Vα or Vγ region comprises SEQ ID NO:304, and a nucleotide sequence encoding the Vβ or Vδ region comprises SEQ ID NO:324;
(y) a nucleotide sequence encoding the Vα or Vγ region comprises SEQ ID NO:305, and a nucleotide sequence encoding the Vβ or Vδ region comprises SEQ ID NO:325;
(z) a nucleotide sequence encoding the Vα or Vγ region comprises SEQ ID NO:306, and a nucleotide sequence encoding the Vβ or Vδ region comprises SEQ ID NO:326;
(aa) a nucleotide sequence encoding the Vα or Vγ region comprises SEQ ID NO:307, and a nucleotide sequence encoding the Vβ or Vo region comprises SEQ ID NO:327;
(ab) a nucleotide sequence encoding the Vα or Vγ region comprises SEQ ID NO:308, and a nucleotide sequence encoding the Vβ or Vδ region comprises SEQ ID NO:328;
(ac) a nucleotide sequence encoding the Vα or Vγ region comprises SEQ ID NO:309, and a nucleotide sequence encoding the Vβ or Vδ region comprises SEQ ID NO:329;
(ad) a nucleotide sequence encoding the Vα or Vγ region comprises SEQ ID NO:310, and a nucleotide sequence encoding the Vβ or Vδ region comprises SEQ ID NO:330;
(ae) a nucleotide sequence encoding the Vα or Vγ region comprises SEQ ID NO:311, and a nucleotide sequence encoding the Vβ or Vδ region comprises SEQ ID NO:331;
(af) a nucleotide sequence encoding the Vα or Vγ region comprises SEQ ID NO:312, and a nucleotide sequence encoding the Vβ or Vδ region comprises SEQ ID NO:332;
(ag) a nucleotide sequence encoding the Vα or Vγ region comprises SEQ ID NO:313, and a nucleotide sequence encoding the Vβ or Vδ region comprises SEQ ID NO:333;
(ah) a nucleotide sequence encoding the Vα or Vγ region comprises SEQ ID NO:314, and a nucleotide sequence encoding the Vβ or Vδ region comprises SEQ ID NO:334;
(ai) a nucleotide sequence encoding the Vα or Vγ region comprises SEQ ID NO:315, and a nucleotide sequence encoding the Vβ or Vo region comprises SEQ ID NO:335;
(aj) a nucleotide sequence encoding the Vα or Vγ region comprises SEQ ID NO:316, and a nucleotide sequence encoding the Vβ or Vδ region comprises SEQ ID NO:336;
(ak) a nucleotide sequence encoding the Vα or Vγ region comprises SEQ ID NO:317, and a nucleotide sequence encoding the Vβ or Vδ region comprises SEQ ID NO:337;
(al) a nucleotide sequence encoding the Vα or Vγ region comprises SEQ ID NO:318, and a nucleotide sequence encoding the Vβ or Vδ region comprises SEQ ID NO:338;
(am) a nucleotide sequence encoding the Vα or Vγ region comprises SEQ ID NO:319, and a nucleotide sequence encoding the Vβ or Vδ region comprises SEQ ID NO:339; or
(an) a nucleotide sequence encoding the Vα or Vγ region comprises SEQ ID NO:320, and a nucleotide sequence encoding the Vβ or Vδ region comprises SEQ ID NO:340.

24. (canceled)

25. (canceled)

26. The pair of nucleic acid sequences of claim 1, wherein the pair of nucleic acid sequences comprise:
(a) a nucleotide sequence encoding the alpha or gamma chain comprises SEQ ID NO:8 or a sequence that has at least 90% sequence identity thereto, and a nucleotide sequence encoding the beta or delta chain comprises SEQ ID NO: 16 or a sequence that has at least 90% sequence identity thereto;
(b) a nucleotide sequence encoding the alpha or gamma chain comprises SEQ ID NO:26 or a sequence that has at least 90% sequence identity thereto, and a nucleotide sequence encoding the beta or delta chain comprises SEQ ID NO:32 or a sequence that has at least 90% sequence identity thereto;
(c) a nucleotide sequence encoding the alpha or gamma chain comprises SEQ ID NO:42 or a sequence that has at least 90% sequence identity thereto, and a nucleotide sequence encoding the beta or delta chain comprises SEQ ID NO:48 or a sequence that has at least 90% sequence identity thereto;
(d) a nucleotide sequence encoding the alpha or gamma chain comprises SEQ ID NO:56 or a sequence that has at least 90% sequence identity thereto, and a nucleotide sequence encoding the beta or delta chain comprises SEQ ID NO:62 or a sequence that has at least 90% sequence identity thereto;
(e) a nucleotide sequence encoding the alpha or gamma chain comprises SEQ ID NO:70 or a sequence that has at least 90% sequence identity thereto, and a nucleotide sequence encoding the beta or delta chain comprises SEQ ID NO:73 or a sequence that has at least 90% sequence identity thereto;
(f) a nucleotide sequence encoding the alpha or gamma chain comprises SEQ ID NO:83 or a sequence that has at least 90% sequence identity thereto, and a nucleotide sequence encoding the beta or delta chain comprises SEQ ID NO:89 or a sequence that has at least 90% sequence identity thereto;
(g) a nucleotide sequence encoding the alpha or gamma chain comprises SEQ ID NO:97 or a sequence that has at least 90% sequence identity thereto, and a nucleotide sequence encoding the beta or delta chain comprises SEQ ID NO: 103 or a sequence that has at least 90% sequence identity thereto;
(h) a nucleotide sequence encoding the alpha or gamma chain comprises SEQ ID NO:111 or a sequence that has at least 90% sequence identity thereto, and a nucleotide sequence encoding the beta or delta chain comprises SEQ ID NO:117 or a sequence that has at least 90% sequence identity thereto;
(i) a nucleotide sequence encoding the alpha or gamma chain comprises SEQ ID NO:125 or a sequence that has at least 90% sequence identity thereto, and a nucleotide sequence encoding the beta or delta chain comprises SEQ ID NO: 131 or a sequence that has at least 90% sequence identity thereto;
(j) a nucleotide sequence encoding the alpha or gamma chain comprises SEQ ID NO:141 or a sequence that has at least 90% sequence identity thereto, and a nucleotide sequence encoding the beta or delta chain comprises SEQ ID NO: 147 or a sequence that has at least 90% sequence identity thereto;
(k) a nucleotide sequence encoding the alpha or gamma chain comprises SEQ ID NO:157 or a sequence that has at least 90% sequence identity thereto, and a nucleotide sequence encoding the beta or delta chain comprises SEQ ID NO: 163 or a sequence that has at least 90% sequence identity thereto;
(1) a nucleotide sequence encoding the alpha or gamma chain comprises SEQ ID NO:171 or a sequence that has at least 90% sequence identity thereto, and a nucleotide sequence encoding the beta or delta chain comprises SEQ ID NO:177 or a sequence that has at least 90% sequence identity thereto;
(m) a nucleotide sequence encoding the alpha or gamma chain comprises SEQ ID NO:185 or a sequence that has at least 90% sequence identity thereto, and a nucleotide sequence encoding the beta or delta chain comprises SEQ ID NO:191 or a sequence that has at least 90% sequence identity thereto;
(n) a nucleotide sequence encoding the alpha or gamma chain comprises SEQ ID NO: 199 or a sequence that has at least 90% sequence identity thereto, and a nucleotide sequence encoding the beta or delta chain comprises SEQ ID NO:205 or a sequence that has at least 90% sequence identity thereto;
(o) a nucleotide sequence encoding the alpha or gamma chain comprises SEQ ID NO:213 or a sequence that has at least 90% sequence identity thereto, and a nucleotide sequence encoding the beta or delta chain comprises SEQ ID NO:219 or a sequence that has at least 90% sequence identity thereto;
(p) a nucleotide sequence encoding the alpha or gamma chain comprises SEQ ID NO:229 or a sequence that has at least 90% sequence identity thereto, and a nucleotide sequence encoding the beta or delta chain comprises SEQ ID NO:235 or a sequence that has at least 90% sequence identity thereto;
(q) a nucleotide sequence encoding the alpha or gamma chain comprises SEQ ID NO:243 or a sequence that has at least 90% sequence identity thereto, and a nucleotide sequence encoding the beta or delta chain comprises SEQ ID NO:249 or a sequence that has at least 90% sequence identity thereto;
(r) a nucleotide sequence encoding the alpha or gamma chain comprises SEQ ID NO:257 or a sequence that has at least 90% sequence identity thereto, and a nucleotide sequence encoding the beta or delta chain comprises SEQ ID NO:263 or a sequence that has at least 90% sequence identity thereto;
(s) a nucleotide sequence encoding the alpha or gamma chain comprises SEQ ID NO:273 or a sequence that has at least 90% sequence identity thereto, and a nucleotide sequence encoding the beta or delta chain comprises SEQ ID NO:275 or a sequence that has at least 90% sequence identity thereto; or
(t) a nucleotide sequence encoding the alpha or gamma chain comprises SEQ ID NO:283 or a sequence that has at least 90% sequence identity thereto, and a nucleotide sequence encoding the beta or delta chain comprises SEQ ID NO:289 or a sequence that has at least 90% sequence identity thereto.

27. (canceled)

28. The pair of nucleic acid sequences of claim 26, wherein the nucleotide sequence encoding the alpha chain and the nucleotide sequence encoding the beta chain are provided in a single open reading frame and are separated by a nucleotide sequence encoding a peptide sequence that causes ribosome skipping.

29. The pair of nucleic acid sequences of claim 28, wherein the peptide that causes ribosome skipping comprises a P2A peptide.

30. (canceled)

31. (canceled)

32. The pair of nucleic acid sequences of claim 29, wherein:
(a) the single open reading frame encodes SEQ ID NO: 18;
(b) the single open reading frame encodes SEQ ID NO:34;
(c) the single open reading frame encodes SEQ ID NO:50;
(d) the single open reading frame encodes SEQ ID NO:64;
(e) the single open reading frame encodes SEQ ID NO:75;
the single open reading frame encodes SEQ ID NO:91; (f)
(g) the single open reading frame encodes SEQ ID NO: 105;
(h) the single open reading frame encodes SEQ ID NO: 119;
(i) the single open reading frame encodes SEQ ID NO: 133;
(j) the single open reading frame encodes SEQ ID NO: 149;
(k) the single open reading frame encodes SEQ ID NO: 165;
(l) the single open reading frame encodes SEQ ID NO:179;
(m) the single open reading frame encodes SEQ ID NO: 193;
(n) the single open reading frame encodes SEQ ID NO:207;
(o) the single open reading frame encodes SEQ ID NO:221;
(p) the single open reading frame encodes SEQ ID NO:237;
(q) the single open reading frame encodes SEQ ID NO:251;
(r) the single open reading frame encodes SEQ ID NO:265;
(s) the single open reading frame encodes SEQ ID NO:277;
(t) the single open reading frame encodes SEQ ID NO:291;
(u) the single open reading frame encodes SEQ ID NO:367;
(v) the single open reading frame encodes SEQ ID NO:377;
(w) the single open reading frame encodes SEQ ID NO:387;
(x) the single open reading frame encodes SEQ ID NO:397;
(y) the single open reading frame encodes SEQ ID NO:407;
(z) the single open reading frame encodes SEQ ID NO:417;
(aa) the single open reading frame encodes SEQ ID NO:427;
(ab) the single open reading frame encodes SEQ ID NO:437;
(ac) the single open reading frame encodes SEQ ID NO:447;
(ad) the single open reading frame encodes SEQ ID NO:457; or
(ae) the single open reading frame encodes SEQ ID NO:488.

33. The pair of nucleic acid of claim 32, wherein the single open reading frame comprises:
(a) the nucleotide sequence of SEQ ID NO: 17;
(b) the nucleotide sequence of SEQ ID NO:33;
(c) the nucleotide sequence of SEQ ID NO:49;
(d) the nucleotide sequence of SEQ ID NO:63;
(e) the nucleotide sequence of SEQ ID NO: 74;
(f) the nucleotide sequence of SEQ ID NO:90;
(g) the nucleotide sequence of SEQ ID NO: 104;
(h) the nucleotide sequence of SEQ ID NO:118;
(i) the nucleotide sequence of SEQ ID NO: 132;
(j) the nucleotide sequence of SEQ ID NO:148;
(k) the nucleotide sequence of SEQ ID NO:164;
(l) the nucleotide sequence of SEQ ID NO:178;
(m) the nucleotide sequence of SEQ ID NO:192;
(n) the nucleotide sequence of SEQ ID NO:206;
(o) the nucleotide sequence of SEQ ID NO:220;
(p) the nucleotide sequence of SEQ ID NO:236;
(q) the nucleotide sequence of SEQ ID NO:250;
(r) the nucleotide sequence of SEQ ID NO:264;
(s) the nucleotide sequence of SEQ ID NO:276;
(t) the nucleotide sequence of SEQ ID NO:290;
(u) the nucleotide sequence of SEQ ID NO:368;
(v) the nucleotide sequence of SEQ ID NO:378;
(w) the nucleotide sequence of SEQ ID NO:388;
(x) the nucleotide sequence of SEQ ID NO:398;
(y) the nucleotide sequence of SEQ ID NO:408;
(z) the nucleotide sequence of SEQ ID NO:418;
(aa) the nucleotide sequence of SEQ ID NO:428;
(ab) the nucleotide sequence of SEQ ID NO:438;
(ac) the nucleotide sequence of SEQ ID NO:448;
(ad) the nucleotide sequence of SEQ ID NO:458; or
(ae) the nucleotide sequence of SEQ ID NO:489.

34. A vector comprising the pair of nucleic acid sequences of claim 1.

35. (canceled)

36. (canceled)

37. An engineered cell, comprising the pair of nucleic acid sequences of claim 1.

38-41. (canceled)

42. The engineered cell of claim 37, wherein the engineered cell is a T cell.

43-65. (canceled)

66. A method of treating a malignant hematologic disorder comprising: administering to a subject a TCR encoded by the pair of nucleic acid sequences of claim 1 or an engineered T cell comprising the pair of nucleic acid sequences of claim 1.

67. The method of claim 66, wherein the subject is eligible for or is to receive an allogeneic hematopoietic stem cell transplantation.

68. (canceled)

69. The method of claim 66, wherein the subject has or has been diagnosed with acute myeloid leukemia (AML), myelodysplastic syndrome (MDS), or acute lymphoblastic leukemia (ALL).

70. The method of claim 66, wherein the subject has or has been diagnosed a liquid tumor, a hematopoietic tumor, a lymphoma, or chronic myeloid leukemia.

71. (canceled)

The application's sequence listing, which the Patent Office published only in electronic form, follows.

SEQUENCE LISTING (491 sequences)

SEQ ID NO: 1 - protein, 6 aa, Artificial Sequence
  TCR Valpha CDR-1 sequence
VSGNPY

SEQ ID NO: 2 - protein, 8 aa, Artificial Sequence
  TCR Valpha CDR-2 sequence
YITGDNLV

SEQ ID NO: 3 - protein, 10 aa, Artificial Sequence
  TCR Valpha CDR-3 sequence
AVRGGSYKYI

SEQ ID NO: 4 - protein, 113 aa, Artificial Sequence
  TCR Valpha sequence
AQSVAQPEDQVNVAEGNPLTVKCTYSVSGNPYLFWYVQYPNRGLQFLLKYITGDNLVKGSYGFEAEFNKSQTSFHLKKPSALVSDSALYFCAVRGGSYKYIFGTGTRLKVLAN

SEQ ID NO: 5 - protein, 132 aa, Artificial Sequence
  TCR Valpha sequence
MASAPISMLAMLFTLSGLRAQSVAQPEDQVNVAEGNPLTVKCTYSVSGNPYLFWYVQYPNRGLQFLLKYITGDNLVKGSYGFEAEFNKSQTSFHLKKPSALVSDSALYFCAVRGGSYKYIFGTGTRLKVLAN

SEQ ID NO: 6 - protein, 272 aa, Artificial Sequence
  TCR alpha chain sequence
MASAPISMLAMLFTLSGLRAQSVAQPEDQVNVAEGNPLTVKCTYSVSGNPYLFWYVQYPNRGLQFLLKYITGDNLVKGSYGFEAEFNKSQTSFHLKKPSALVSDSALYFCAVRGGSYKYIFGTGTRLKVLANIQNPDPAVYQLRDSKSSDKSVCLFTDFDSQTNVSQSKDSDVYITDKTVLDMRSMDFKSNSAVAWSNKSDFACANAFNNSIIPEDTFFPSPESSCDVKLVEKSFETDTNLNFQNLSVIGFRILLLKVAGFNLLMTLRLWSS

SEQ ID NO: 7 - DNA, 396 bp, Artificial Sequence
  TCR Valpha sequence
atggcctctgcacccatctcgatgcttgcgatgctcttcacattgagtgggctgagagctcagtcagtggctcagccggaagatcaggtcaacgttgctgaagggaatcctctgactgtgaaatgcacctattcagtctctggaaacccttatcttttttggtatgttcaataccccaaccgaggcctccagttccttctgaaatacatcacaggggataacctggttaaaggcagctatggctttgaagctgaatttaacaagagccaaacctccttccacctgaagaaaccatctgcccttgtgagcgactccgctttgtacttctgtgctgtgagagggggttcctacaaatacatctttggaacaggcaccaggctgaaggttttagcaaat

SEQ ID NO: 8 - DNA, 816 bp, Artificial Sequence
  TCR alpha chain sequence
atggcctctgcacccatctcgatgcttgcgatgctcttcacattgagtgggctgagagctcagtcagtggctcagccggaagatcaggtcaacgttgctgaagggaatcctctgactgtgaaatgcacctattcagtctctggaaacccttatcttttttggtatgttcaataccccaaccgaggcctccagttccttctgaaatacatcacaggggataacctggttaaaggcagctatggctttgaagctgaatttaacaagagccaaacctccttccacctgaagaaaccatctgcccttgtgagcgactccgctttgtacttctgtgctgtgagagggggttcctacaaatacatctttggaacaggcaccaggctgaaggttttagcaaatatccagaaccctgaccctgccgtgtaccagctgagagactctaaatccagtgacaagtctgtctgcctattcaccgattttgattctcaaacaaatgtgtcacaaagtaaggattctgatgtgtatatcacagacaaaactgtgctagacatgaggtctatggacttcaagagcaacagtgctgtggcctggagcaacaaatctgactttgcatgtgcaaacgccttcaacaacagcattattccagaagacaccttcttccccagcccagaaagttcctgtgatgtcaagctggtcgagaaaagctttgaaacagatacgaacctaaactttcaaaacctgtcagtgattgggttccgaatcctcctcctgaaagtggccgggtttaatctgctcatgacgctgcggctgtggtccagc

SEQ ID NO: 9 - protein, 5 aa, Artificial Sequence
  TCR Vbeta CDR-1 sequence
SEHNR

SEQ ID NO: 10 - protein, 6 aa, Artificial Sequence
  TCR Vbeta CDR-2 sequence
FQNEAQ

SEQ ID NO: 11 - protein, 12 aa, Artificial Sequence
  TCR Vbeta CDR-3 sequence
ASTPGTVYNEQF

SEQ ID NO: 12 - protein, 115 aa, Artificial Sequence
  TCR Vbeta sequence
DTGVSQDPRHKITKRGQNVTFRCDPISEHNRLYWYRQTLGQGPEFLTYFQNEAQLEKSRLLSDRFSAERPKGSFSTLEIQRTEQGDSAMYLCASTPGTVYNEQFFGPGTRLTVLE

SEQ ID NO: 13 - protein, 134 aa, Artificial Sequence
  TCR Vbeta sequence
MGTSLLCWMALCLLGADHADTGVSQDPRHKITKRGQNVTFRCDPISEHNRLYWYRQTLGQGPEFLTYFQNEAQLEKSRLLSDRFSAERPKGSFSTLEIQRTEQGDSAMYLCASTPGTVYNEQFFGPGTRLTVLE

SEQ ID NO: 14 - protein, 312 aa, Artificial Sequence
  TCR beta chain sequence
MGTSLLCWMALCLLGADHADTGVSQDPRHKITKRGQNVTFRCDPISEHNRLYWYRQTLGQGPEFLTYFQNEAQLEKSRLLSDRFSAERPKGSFSTLEIQRTEQGDSAMYLCASTPGTVYNEQFFGPGTRLTVLEDLKNVFPPEVAVFEPSEAEISHTQKATLVCLATGFYPDHVELSWWVNGKEVHSGVSTDPQPLKEQPALNDSRYCLSSRLRVSATFWQNPRNHFRCQVQFYGLSENDEWTQDRAKPVTQIVSAEAWGRADCGFTSESYQQGVLSATILYEILLGKATLYAVLVSALVLMAMVKRKDSRG

SEQ ID NO: 15 - DNA, 402 bp, Artificial Sequence
  TCR Vbeta sequence
atgggtaccagcctcctctgctggatggccctgtgtctcctgggggcagatcacgcagatactggagtctcccaggaccccagacacaagatcacaaagaggggacagaatgtaactttcaggtgtgatccaatttctgaacacaaccgcctttattggtaccgacagaccctggggcagggcccagagtttctgacttacttccagaatgaagctcaactagaaaaatcaaggctgctcagtgatcggttctctgcagagaggcctaagggatctttctccaccttggagatccagcgcacagagcagggggactcggccatgtatctctgtgccagcacccccgggacggtctacaatgagcagttcttcgggccagggacacggctcaccgtgctagag

SEQ ID NO: 16 - DNA, 939 bp, Artificial Sequence
  TCR beta chain sequence
atgggtaccagcctcctctgctggatggccctgtgtctcctgggggcagatcacgcagatactggagtctcccaggaccccagacacaagatcacaaagaggggacagaatgtaactttcaggtgtgatccaatttctgaacacaaccgcctttattggtaccgacagaccctggggcagggcccagagtttctgacttacttccagaatgaagctcaactagaaaaatcaaggctgctcagtgatcggttctctgcagagaggcctaagggatctttctccaccttggagatccagcgcacagagcagggggactcggccatgtatctctgtgccagcacccccgggacggtctacaatgagcagttcttcgggccagggacacggctcaccgtgctagaggacctgaaaaacgtgttcccacccgaggtcgctgtgtttgagccatcagaagcagagatctcccacacccaaaaggccacactggtatgcctggccacaggcttctaccccgaccacgtggagctgagctggtgggtgaatgggaaggaggtgcacagtggggtcagcacagacccgcagcccctcaaggagcagcccgccctcaatgactccagatactgcctgagcagccgcctgagggtctcggccaccttctggcagaacccccgcaaccacttccgctgtcaagtccagttctacgggctctcggagaatgacgagtggacccaggatagggccaaacctgtcacccagatcgtcagcgccgaggcctggggtagagcagactgtggcttcacctccgagtcttaccagcaaggggtcctgtctgccaccatcctctatgagatcttgctagggaaggccaccttgtatgccgtgctggtcagtgccctcgtgctgatggccatggtcaagagaaaggattccagaggctag

SEQ ID NO: 17 - DNA, 1821 bp, Artificial Sequence
  TCR sequence
atggcctctgcacccatctcgatgcttgcgatgctcttcacattgagtgggctgagagctcagtcagtggctcagccggaagatcaggtcaacgttgctgaagggaatcctctgactgtgaaatgcacctattcagtctctggaaacccttatcttttttggtatgttcaataccccaaccgaggcctccagttccttctgaaatacatcacaggggataacctggttaaaggcagctatggctttgaagctgaatttaacaagagccaaacctccttccacctgaagaaaccatctgcccttgtgagcgactccgctttgtacttctgtgctgtgagagggggttcctacaaatacatctttggaacaggcaccaggctgaaggttttagcaaatatccagaaccctgaccctgccgtgtaccagctgagagactctaaatccagtgacaagtctgtctgcctattcaccgattttgattctcaaacaaatgtgtcacaaagtaaggattctgatgtgtatatcacagacaaaactgtgctagacatgaggtctatggacttcaagagcaacagtgctgtggcctggagcaacaaatctgactttgcatgtgcaaacgccttcaacaacagcattattccagaagacaccttcttccccagcccagaaagttcctgtgatgtcaagctggtcgagaaaagctttgaaacagatacgaacctaaactttcaaaacctgtcagtgattgggttccgaatcctcctcctgaaagtggccgggtttaatctgctcatgacgctgcggctgtggtccagcggctccggagccacgaacttctctctgttaaagcaagcaggagacgtggaagaaaaccccggtcccatgggtaccagcctcctctgctggatggccctgtgtctcctgggggcagatcacgcagatactggagtctcccaggaccccagacacaagatcacaaagaggggacagaatgtaactttcaggtgtgatccaatttctgaacacaaccgcctttattggtaccgacagaccctggggcagggcccagagtttctgacttacttccagaatgaagctcaactagaaaaatcaaggctgctcagtgatcggttctctgcagagaggcctaagggatctttctccaccttggagatccagcgcacagagcagggggactcggccatgtatctctgtgccagcacccccgggacggtctacaatgagcagttcttcgggccagggacacggctcaccgtgctagaggacctgaaaaacgtgttcccacccgaggtcgctgtgtttgagccatcagaagcagagatctcccacacccaaaaggccacactggtatgcctggccacaggcttctaccccgaccacgtggagctgagctggtgggtgaatgggaaggaggtgcacagtggggtcagcacagacccgcagcccctcaaggagcagcccgccctcaatgactccagatactgcctgagcagccgcctgagggtctcggccaccttctggcagaacccccgcaaccacttccgctgtcaagtccagttctacgggctctcggagaatgacgagtggacccaggatagggccaaacctgtcacccagatcgtcagcgccgaggcctggggtagagcagactgtggcttcacctccgagtcttaccagcaaggggtcctgtctgccaccatcctctatgagatcttgctagggaaggccaccttgtatgccgtgctggtcagtgccctcgtgctgatggccatggtcaagagaaaggattccagaggctag

SEQ ID NO: 18 - protein, 606 aa, Artificial Sequence
  TCR sequence
MASAPISMLAMLFTLSGLRAQSVAQPEDQVNVAEGNPLTVKCTYSVSGNPYLFWYVQYPNRGLQFLLKYITGDNLVKGSYGFEAEFNKSQTSFHLKKPSALVSDSALYFCAVRGGSYKYIFGTGTRLKVLANIQNPDPAVYQLRDSKSSDKSVCLFTDFDSQTNVSQSKDSDVYITDKTVLDMRSMDFKSNSAVAWSNKSDFACANAFNNSIIPEDTFFPSPESSCDVKLVEKSFETDTNLNFQNLSVIGFRILLLKVAGFNLLMTLRLWSSGSGATNFSLLKQAGDVEENPGPMGTSLLCWMALCLLGADHADTGVSQDPRHKITKRGQNVTFRCDPISEHNRLYWYRQTLGQGPEFLTYFQNEAQLEKSRLLSDRFSAERPKGSFSTLEIQRTEQGDSAMYLCASTPGTVYNEQFFGPGTRLTVLEDLKNVFPPEVAVFEPSEAEISHTQKATLVCLATGFYPDHVELSWWVNGKEVHSGVSTDPQPLKEQPALNDSRYCLSSRLRVSATFWQNPRNHFRCQVQFYGLSENDEWTQDRAKPVTQIVSAEAWGRADCGFTSESYQQGVLSATILYEILLGKATLYAVLVSALVLMAMVKRKDSRG

SEQ ID NO: 19 - protein, 5 aa, Artificial Sequence
  TCR Valpha CDR-1 sequence
TSINN

SEQ ID NO: 20 - protein, 7 aa, Artificial Sequence
  TCR Valpha CDR-2 sequence
IRSNERE

SEQ ID NO: 21 - protein, 12 aa, Artificial Sequence
  TCR Valpha CDR-3 sequence
ATAPGSGTYKYI

SEQ ID NO: 22 - protein, 113 aa, Artificial Sequence
  TCR Valpha sequence
SQQGEEDPQALSIQEGENATMNCSYKTSINNLQWYRQNSGRGLVHLILIRSNEREKHSGRLRVTLDTSKKSSSLLITASRAADTASYFCATAPGSGTYKYIFGTGTRLKVLAN

SEQ ID NO: 23 - protein, 133 aa, Artificial Sequence
  TCR Valpha sequence
METLLGVSLVILWLQLARVNSQQGEEDPQALSIQEGENATMNCSYKTSINNLQWYRQNSGRGLVHLILIRSNEREKHSGRLRVTLDTSKKSSSLLITASRAADTASYFCATAPGSGTYKYIFGTGTRLKVLAN

SEQ ID NO: 24 - protein, 273 aa, Artificial Sequence
  TCR alpha chain sequence
METLLGVSLVILWLQLARVNSQQGEEDPQALSIQEGENATMNCSYKTSINNLQWYRQNSGRGLVHLILIRSNEREKHSGRLRVTLDTSKKSSSLLITASRAADTASYFCATAPGSGTYKYIFGTGTRLKVLANIQNPDPAVYQLRDSKSSDKSVCLFTDFDSQTNVSQSKDSDVYITDKTVLDMRSMDFKSNSAVAWSNKSDFACANAFNNSIIPEDTFFPSPESSCDVKLVEKSFETDTNLNFQNLSVIGFRILLLKVAGFNLLMTLRLWSS

SEQ ID NO: 25 - DNA, 399 bp, Artificial Sequence
  TCR Vbeta sequence
atggaaactctcctgggagtgtctttggtgattctatggcttcaactggctagggtgaacagtcaacagggagaagaggatcctcaggccttgagcatccaggagggtgaaaatgccaccatgaactgcagttacaaaactagtataaacaatttacagtggtatagacaaaattcaggtagaggccttgtccacctaattttaatacgttcaaatgaaagagagaaacacagtggaagattaagagtcacgcttgacacttccaagaaaagcagttccttgttgatcacggcttcccgggcagcagacactgcttcttacttctgtgctacggcccctggctcaggaacctacaaatacatctttggaacaggcaccaggctgaaggttttagcaaat

SEQ ID NO: 26 - DNA, 819 bp, Artificial Sequence
  TCR beta chain sequence
atggaaactctcctgggagtgtctttggtgattctatggcttcaactggctagggtgaacagtcaacagggagaagaggatcctcaggccttgagcatccaggagggtgaaaatgccaccatgaactgcagttacaaaactagtataaacaatttacagtggtatagacaaaattcaggtagaggccttgtccacctaattttaatacgttcaaatgaaagagagaaacacagtggaagattaagagtcacgcttgacacttccaagaaaagcagttccttgttgatcacggcttcccgggcagcagacactgcttcttacttctgtgctacggcccctggctcaggaacctacaaatacatctttggaacaggcaccaggctgaaggttttagcaaatatccagaaccctgaccctgccgtgtaccagctgagagactctaaatccagtgacaagtctgtctgcctattcaccgattttgattctcaaacaaatgtgtcacaaagtaaggattctgatgtgtatatcacagacaaaactgtgctagacatgaggtctatggacttcaagagcaacagtgctgtggcctggagcaacaaatctgactttgcatgtgcaaacgccttcaacaacagcattattccagaagacaccttcttccccagcccagaaagttcctgtgatgtcaagctggtcgagaaaagctttgaaacagatacgaacctaaactttcaaaacctgtcagtgattgggttccgaatcctcctcctgaaagtggccgggtttaatctgctcatgacgctgcggctgtggtccagc

SEQ ID NO: 27 - protein, 12 aa, Artificial Sequence
  TCR Vbeta CDR-3 sequence
AAPPDTYNSPLH

SEQ ID NO: 28 - protein, 115 aa, Artificial Sequence
  TCR Vbeta sequence
DTGVSQDPRHKITKRGQNVTFRCDPISEHNRLYWYRQTLGQGPEFLTYFQNEAQLEKSRLLSDRFSAERPKGSFSTLEIQRTEQGDSAMYLCAAPPDTYNSPLHFGNGTRLTVTE

SEQ ID NO: 29 - protein, 134 aa, Artificial Sequence
  TCR Vbeta sequence
MGTSLLCWMALCLLGADHADTGVSQDPRHKITKRGQNVTFRCDPISEHNRLYWYRQTLGQGPEFLTYFQNEAQLEKSRLLSDRFSAERPKGSFSTLEIQRTEQGDSAMYLCAAPPDTYNSPLHFGNGTRLTVTE

SEQ ID NO: 30 - protein, 310 aa, Artificial Sequence
  TCR beta chain sequence
MGTSLLCWMALCLLGADHADTGVSQDPRHKITKRGQNVTFRCDPISEHNRLYWYRQTLGQGPEFLTYFQNEAQLEKSRLLSDRFSAERPKGSFSTLEIQRTEQGDSAMYLCAAPPDTYNSPLHFGNGTRLTVTEDLNKVFPPEVAVFEPSEAEISHTQKATLVCLATGFFPDHVELSWWVNGKEVHSGVSTDPQPLKEQPALNDSRYCLSSRLRVSATFWQNPRNHFRCQVQFYGLSENDEWTQDRAKPVTQIVSAEAWGRADCGFTSVSYQQGVLSATILYEILLGKATLYAVLVSALVLMAMVKRKDF

SEQ ID NO: 31 - DNA, 402 bp, Artificial Sequence
  TCR Vbeta sequence
atgggtaccagcctcctctgctggatggccctgtgtctcctgggggcagatcacgcagatactggagtctcccaggaccccagacacaagatcacaaagaggggacagaatgtaactttcaggtgtgatccaatttctgaacacaaccgcctttattggtaccgacagaccctggggcagggcccagagtttctgacttacttccagaatgaagctcaactagaaaaatcaaggctgctcagtgatcggttctctgcagagaggcctaagggatctttctccaccttggagatccagcgcacagagcagggggactcggccatgtatctctgtgccgcccccccggacacctataattcacccctccactttgggaatgggaccaggctcactgtgacagag

SEQ ID NO: 32 - DNA, 933 bp, Artificial Sequence
  TCR beta chain sequence
atgggtaccagcctcctctgctggatggccctgtgtctcctgggggcagatcacgcagatactggagtctcccaggaccccagacacaagatcacaaagaggggacagaatgtaactttcaggtgtgatccaatttctgaacacaaccgcctttattggtaccgacagaccctggggcagggcccagagtttctgacttacttccagaatgaagctcaactagaaaaatcaaggctgctcagtgatcggttctctgcagagaggcctaagggatctttctccaccttggagatccagcgcacagagcagggggactcggccatgtatctctgtgccgcccccccggacacctataattcacccctccactttgggaatgggaccaggctcactgtgacagaggacctgaacaaggtgttcccacccgaggtcgctgtgtttgagccatcagaagcagagatctcccacacccaaaaggccacactggtgtgcctggccacaggcttcttccccgaccacgtggagctgagctggtgggtgaatgggaaggaggtgcacagtggggtcagcacagacccgcagcccctcaaggagcagcccgccctcaatgactccagatactgcctgagcagccgcctgagggtctcggccaccttctggcagaacccccgcaaccacttccgctgtcaagtccagttctacgggctctcggagaatgacgagtggacccaggatagggccaaacccgtcacccagatcgtcagcgccgaggcctggggtagagcagactgtggctttacctcggtgtcctaccagcaaggggtcctgtctgccaccatcctctatgagatcctgctagggaaggccaccctgtatgctgtgctggtcagcgcccttgtgttgatggccatggtcaagagaaaggatttctga

SEQ ID NO: 33 - DNA, 1818 bp, Artificial Sequence
  TCR sequence
atggaaactctcctgggagtgtctttggtgattctatggcttcaactggctagggtgaacagtcaacagggagaagaggatcctcaggccttgagcatccaggagggtgaaaatgccaccatgaactgcagttacaaaactagtataaacaatttacagtggtatagacaaaattcaggtagaggccttgtccacctaattttaatacgttcaaatgaaagagagaaacacagtggaagattaagagtcacgcttgacacttccaagaaaagcagttccttgttgatcacggcttcccgggcagcagacactgcttcttacttctgtgctacggcccctggctcaggaacctacaaatacatctttggaacaggcaccaggctgaaggttttagcaaatatccagaaccctgaccctgccgtgtaccagctgagagactctaaatccagtgacaagtctgtctgcctattcaccgattttgattctcaaacaaatgtgtcacaaagtaaggattctgatgtgtatatcacagacaaaactgtgctagacatgaggtctatggacttcaagagcaacagtgctgtggcctggagcaacaaatctgactttgcatgtgcaaacgccttcaacaacagcattattccagaagacaccttcttccccagcccagaaagttcctgtgatgtcaagctggtcgagaaaagctttgaaacagatacgaacctaaactttcaaaacctgtcagtgattgggttccgaatcctcctcctgaaagtggccgggtttaatctgctcatgacgctgcggctgtggtccagcggctccggagccacgaacttctctctgttaaagcaagcaggagacgtggaagaaaaccccggtcccatgggtaccagcctcctctgctggatggccctgtgtctcctgggggcagatcacgcagatactggagtctcccaggaccccagacacaagatcacaaagaggggacagaatgtaactttcaggtgtgatccaatttctgaacacaaccgcctttattggtaccgacagaccctggggcagggcccagagtttctgacttacttccagaatgaagctcaactagaaaaatcaaggctgctcagtgatcggttctctgcagagaggcctaagggatctttctccaccttggagatccagcgcacagagcagggggactcggccatgtatctctgtgccgcccccccggacacctataattcacccctccactttgggaatgggaccaggctcactgtgacagaggacctgaacaaggtgttcccacccgaggtcgctgtgtttgagccatcagaagcagagatctcccacacccaaaaggccacactggtgtgcctggccacaggcttcttccccgaccacgtggagctgagctggtgggtgaatgggaaggaggtgcacagtggggtcagcacagacccgcagcccctcaaggagcagcccgccctcaatgactccagatactgcctgagcagccgcctgagggtctcggccaccttctggcagaacccccgcaaccacttccgctgtcaagtccagttctacgggctctcggagaatgacgagtggacccaggatagggccaaacccgtcacccagatcgtcagcgccgaggcctggggtagagcagactgtggctttacctcggtgtcctaccagcaaggggtcctgtctgccaccatcctctatgagatcctgctagggaaggccaccctgtatgctgtgctggtcagcgcccttgtgttgatggccatggtcaagagaaaggatttctga

SEQ ID NO: 34 - protein, 605 aa, Artificial Sequence
  TCR sequence
METLLGVSLVILWLQLARVNSQQGEEDPQALSIQEGENATMNCSYKTSINNLQWYRQNSGRGLVHLILIRSNEREKHSGRLRVTLDTSKKSSSLLITASRAADTASYFCATAPGSGTYKYIFGTGTRLKVLANIQNPDPAVYQLRDSKSSDKSVCLFTDFDSQTNVSQSKDSDVYITDKTVLDMRSMDFKSNSAVAWSNKSDFACANAFNNSIIPEDTFFPSPESSCDVKLVEKSFETDTNLNFQNLSVIGFRILLLKVAGFNLLMTLRLWSSGSGATNFSLLKQAGDVEENPGPMGTSLLCWMALCLLGADHADTGVSQDPRHKITKRGQNVTFRCDPISEHNRLYWYRQTLGQGPEFLTYFQNEAQLEKSRLLSDRFSAERPKGSFSTLEIQRTEQGDSAMYLCAAPPDTYNSPLHFGNGTRLTVTEDLNKVFPPEVAVFEPSEAEISHTQKATLVCLATGFFPDHVELSWWVNGKEVHSGVSTDPQPLKEQPALNDSRYCLSSRLRVSATFWQNPRNHFRCQVQFYGLSENDEWTQDRAKPVTQIVSAEAWGRADCGFTSVSYQQGVLSATILYEILLGKATLYAVLVSALVLMAMVKRKDF

SEQ ID NO: 35 - protein, 6 aa, Artificial Sequence
  TCR Valpha CDR-1 sequence
DSAIYN

SEQ ID NO: 36 - protein, 7 aa, Artificial Sequence
  TCR Valpha CDR-2 sequence
IQSSQRE

SEQ ID NO: 37 - protein, 13 aa, Artificial Sequence
  TCR Valpha CDR-3 sequence
AVRPRTSGTYKYI

SEQ ID NO: 38 - protein, 115 aa, Artificial Sequence
  TCR Valpha sequence
KQEVTQIPAALSVPEGENLVLNCSFTDSAIYNLQWFRQDPGKGLTSLLLIQSSQREQTSGRLNASLDKSSGRSTLYIAASQPGDSATYLCAVRPRTSGTYKYIFGTGTRLKVLAN

SEQ ID NO: 39 - protein, 134 aa, Artificial Sequence
  TCR Valpha sequence
METLLGLLILWLQLQWVSSKQEVTQIPAALSVPEGENLVLNCSFTDSAIYNLQWFRQDPGKGLTSLLLIQSSQREQTSGRLNASLDKSSGRSTLYIAASQPGDSATYLCAVRPRTSGTYKYIFGTGTRLKVLAN

SEQ ID NO: 40 - protein, 274 aa, Artificial Sequence
  TCR alpha chain sequence
METLLGLLILWLQLQWVSSKQEVTQIPAALSVPEGENLVLNCSFTDSAIYNLQWFRQDPGKGLTSLLLIQSSQREQTSGRLNASLDKSSGRSTLYIAASQPGDSATYLCAVRPRTSGTYKYIFGTGTRLKVLANIQNPDPAVYQLRDSKSSDKSVCLFTDFDSQTNVSQSKDSDVYITDKTVLDMRSMDFKSNSAVAWSNKSDFACANAFNNSIIPEDTFFPSPESSCDVKLVEKSFETDTNLNFQNLSVIGFRILLLKVAGFNLLMTLRLWSS

SEQ ID NO: 41 - DNA, 402 bp, Artificial Sequence
  TCR Valpha sequence
atggagaccctcttgggcctgcttatcctttggctgcagctgcaatgggtgagcagcaaacaggaggtgacgcagattcctgcagctctgagtgtcccagaaggagaaaacttggttctcaactgcagtttcactgatagcgctatttacaacctccagtggtttaggcaggaccctgggaaaggtctcacatctctgttgcttattcagtcaagtcagagagagcaaacaagtggaagacttaatgcctcgctggataaatcatcaggacgtagtactttatacattgcagcttctcagcctggtgactcagccacctacctctgtgctgtgaggcctcggacctcaggaacctacaaatacatctttggaacaggcaccaggctgaaggttttagcaaat

SEQ ID NO: 42 - DNA, 822 bp, Artificial Sequence
  TCR alpha chain sequence
atggagaccctcttgggcctgcttatcctttggctgcagctgcaatgggtgagcagcaaacaggaggtgacgcagattcctgcagctctgagtgtcccagaaggagaaaacttggttctcaactgcagtttcactgatagcgctatttacaacctccagtggtttaggcaggaccctgggaaaggtctcacatctctgttgcttattcagtcaagtcagagagagcaaacaagtggaagacttaatgcctcgctggataaatcatcaggacgtagtactttatacattgcagcttctcagcctggtgactcagccacctacctctgtgctgtgaggcctcggacctcaggaacctacaaatacatctttggaacaggcaccaggctgaaggttttagcaaatatccagaaccctgaccctgccgtgtaccagctgagagactctaaatccagtgacaagtctgtctgcctattcaccgattttgattctcaaacaaatgtgtcacaaagtaaggattctgatgtgtatatcacagacaaaactgtgctagacatgaggtctatggacttcaagagcaacagtgctgtggcctggagcaacaaatctgactttgcatgtgcaaacgccttcaacaacagcattattccagaagacaccttcttccccagcccagaaagttcctgtgatgtcaagctggtcgagaaaagctttgaaacagatacgaacctaaactttcaaaacctgtcagtgattgggttccgaatcctcctcctgaaagtggccgggtttaatctgctcatgacgctgcggctgtggtccagc

SEQ ID NO: 43 - protein, 11 aa, Artificial Sequence
  TCR Vbeta CDR-3 sequence
ASTELSGNTIY

SEQ ID NO: 44 - protein, 114 aa, Artificial Sequence
  TCR Vbeta sequence
DTGVSQDPRHKITKRGQNVTFRCDPISEHNRLYWYRQTLGQGPEFLTYFQNEAQLEKSRLLSDRFSAERPKGSFSTLEIQRTEQGDSAMYLCASTELSGNTIYFGEGSWLTVVE

SEQ ID NO: 45 - protein, 133 aa, Artificial Sequence
  TCR Vbeta sequence
MGTSLLCWMALCLLGADHADTGVSQDPRHKITKRGQNVTFRCDPISEHNRLYWYRQTLGQGPEFLTYFQNEAQLEKSRLLSDRFSAERPKGSFSTLEIQRTEQGDSAMYLCASTELSGNTIYFGEGSWLTVVE

SEQ ID NO: 46 - protein, 309 aa, Artificial Sequence
  TCR beta chain sequence
MGTSLLCWMALCLLGADHADTGVSQDPRHKITKRGQNVTFRCDPISEHNRLYWYRQTLGQGPEFLTYFQNEAQLEKSRLLSDRFSAERPKGSFSTLEIQRTEQGDSAMYLCASTELSGNTIYFGEGSWLTVVEDLNKVFPPEVAVFEPSEAEISHTQKATLVCLATGFFPDHVELSWWVNGKEVHSGVSTDPQPLKEQPALNDSRYCLSSRLRVSATFWQNPRNHFRCQVQFYGLSENDEWTQDRAKPVTQIVSAEAWGRADCGFTSVSYQQGVLSATILYEILLGKATLYAVLVSALVLMAMVKRKDF

SEQ ID NO: 47 - DNA, 399 bp, Artificial Sequence
  TCR Vbeta sequence
atgggtaccagcctcctctgctggatggccctgtgtctcctgggggcagatcacgcagatactggagtctcccaggaccccagacacaagatcacaaagaggggacagaatgtaactttcaggtgtgatccaatttctgaacacaaccgcctttattggtaccgacagaccctggggcagggcccagagtttctgacttacttccagaatgaagctcaactagaaaaatcaaggctgctcagtgatcggttctctgcagagaggcctaagggatctttctccaccttggagatccagcgcacagagcagggggactcggccatgtatctctgtgccagcacagaactctctggaaacaccatatattttggagagggaagttggctcactgttgtagag

SEQ ID NO: 48 - DNA, 930 bp, Artificial Sequence
  TCR beta chain sequence
atgggtaccagcctcctctgctggatggccctgtgtctcctgggggcagatcacgcagatactggagtctcccaggaccccagacacaagatcacaaagaggggacagaatgtaactttcaggtgtgatccaatttctgaacacaaccgcctttattggtaccgacagaccctggggcagggcccagagtttctgacttacttccagaatgaagctcaactagaaaaatcaaggctgctcagtgatcggttctctgcagagaggcctaagggatctttctccaccttggagatccagcgcacagagcagggggactcggccatgtatctctgtgccagcacagaactctctggaaacaccatatattttggagagggaagttggctcactgttgtagaggacctgaacaaggtgttcccacccgaggtcgctgtgtttgagccatcagaagcagagatctcccacacccaaaaggccacactggtgtgcctggccacaggcttcttccccgaccacgtggagctgagctggtgggtgaatgggaaggaggtgcacagtggggtcagcacagacccgcagcccctcaaggagcagcccgccctcaatgactccagatactgcctgagcagccgcctgagggtctcggccaccttctggcagaacccccgcaaccacttccgctgtcaagtccagttctacgggctctcggagaatgacgagtggacccaggatagggccaaacccgtcacccagatcgtcagcgccgaggcctggggtagagcagactgtggctttacctcggtgtcctaccagcaaggggtcctgtctgccaccatcctctatgagatcctgctagggaaggccaccctgtatgctgtgctggtcagcgcccttgtgttgatggccatggtcaagagaaaggatttctga

SEQ ID NO: 49 - DNA, 1818 bp, Artificial Sequence
  TCR sequence
atggagaccctcttgggcctgcttatcctttggctgcagctgcaatgggtgagcagcaaacaggaggtgacgcagattcctgcagctctgagtgtcccagaaggagaaaacttggttctcaactgcagtttcactgatagcgctatttacaacctccagtggtttaggcaggaccctgggaaaggtctcacatctctgttgcttattcagtcaagtcagagagagcaaacaagtggaagacttaatgcctcgctggataaatcatcaggacgtagtactttatacattgcagcttctcagcctggtgactcagccacctacctctgtgctgtgaggcctcggacctcaggaacctacaaatacatctttggaacaggcaccaggctgaaggttttagcaaatatccagaaccctgaccctgccgtgtaccagctgagagactctaaatccagtgacaagtctgtctgcctattcaccgattttgattctcaaacaaatgtgtcacaaagtaaggattctgatgtgtatatcacagacaaaactgtgctagacatgaggtctatggacttcaagagcaacagtgctgtggcctggagcaacaaatctgactttgcatgtgcaaacgccttcaacaacagcattattccagaagacaccttcttccccagcccagaaagttcctgtgatgtcaagctggtcgagaaaagctttgaaacagatacgaacctaaactttcaaaacctgtcagtgattgggttccgaatcctcctcctgaaagtggccgggtttaatctgctcatgacgctgcggctgtggtccagcggctccggagccacgaacttctctctgttaaagcaagcaggagacgtggaagaaaaccccggtcccatgggtaccagcctcctctgctggatggccctgtgtctcctgggggcagatcacgcagatactggagtctcccaggaccccagacacaagatcacaaagaggggacagaatgtaactttcaggtgtgatccaatttctgaacacaaccgcctttattggtaccgacagaccctggggcagggcccagagtttctgacttacttccagaatgaagctcaactagaaaaatcaaggctgctcagtgatcggttctctgcagagaggcctaagggatctttctccaccttggagatccagcgcacagagcagggggactcggccatgtatctctgtgccagcacagaactctctggaaacaccatatattttggagagggaagttggctcactgttgtagaggacctgaacaaggtgttcccacccgaggtcgctgtgtttgagccatcagaagcagagatctcccacacccaaaaggccacactggtgtgcctggccacaggcttcttccccgaccacgtggagctgagctggtgggtgaatgggaaggaggtgcacagtggggtcagcacagacccgcagcccctcaaggagcagcccgccctcaatgactccagatactgcctgagcagccgcctgagggtctcggccaccttctggcagaacccccgcaaccacttccgctgtcaagtccagttctacgggctctcggagaatgacgagtggacccaggatagggccaaacccgtcacccagatcgtcagcgccgaggcctggggtagagcagactgtggctttacctcggtgtcctaccagcaaggggtcctgtctgccaccatcctctatgagatcctgctagggaaggccaccctgtatgctgtgctggtcagcgcccttgtgttgatggccatggtcaagagaaaggatttctga

SEQ ID NO: 50 - protein, 605 aa, Artificial Sequence
  TCR sequence
METLLGLLILWLQLQWVSSKQEVTQIPAALSVPEGENLVLNCSFTDSAIYNLQWFRQDPGKGLTSLLLIQSSQREQTSGRLNASLDKSSGRSTLYIAASQPGDSATYLCAVRPRTSGTYKYIFGTGTRLKVLANIQNPDPAVYQLRDSKSSDKSVCLFTDFDSQTNVSQSKDSDVYITDKTVLDMRSMDFKSNSAVAWSNKSDFACANAFNNSIIPEDTFFPSPESSCDVKLVEKSFETDTNLNFQNLSVIGFRILLLKVAGFNLLMTLRLWSSGSGATNFSLLKQAGDVEENPGPMGTSLLCWMALCLLGADHADTGVSQDPRHKITKRGQNVTFRCDPISEHNRLYWYRQTLGQGPEFLTYFQNEAQLEKSRLLSDRFSAERPKGSFSTLEIQRTEQGDSAMYLCASTELSGNTIYFGEGSWLTVVEDLNKVFPPEVAVFEPSEAEISHTQKATLVCLATGFFPDHVELSWWVNGKEVHSGVSTDPQPLKEQPALNDSRYCLSSRLRVSATFWQNPRNHFRCQVQFYGLSENDEWTQDRAKPVTQIVSAEAWGRADCGFTSVSYQQGVLSATILYEILLGKATLYAVLVSALVLMAMVKRKDF

SEQ ID NO: 51 - protein, 13 aa, Artificial Sequence
  TCR Valpha CDR-3 sequence
AVRAPTSGTYKYI

SEQ ID NO: 52 - protein, 116 aa, Artificial Sequence
  TCR Valpha sequence
AQSVAQPEDQVNVAEGNPLTVKCTYSVSGNPYLFWYVQYPNRGLQFLLKYITGDNLVKGSYGFEAEFNKSQTSFHLKKPSALVSDSALYFCAVRAPTSGTYKYIFGTGTRLKVLAN

SEQ ID NO: 53 - protein, 135 aa, Artificial Sequence
  TCR Valpha sequence
MASAPISMLAMLFTLSGLRAQSVAQPEDQVNVAEGNPLTVKCTYSVSGNPYLFWYVQYPNRGLQFLLKYITGDNLVKGSYGFEAEFNKSQTSFHLKKPSALVSDSALYFCAVRAPTSGTYKYIFGTGTRLKVLAN

SEQ ID NO: 54 - protein, 275 aa, Artificial Sequence
  TCR alpha chain sequence
MASAPISMLAMLFTLSGLRAQSVAQPEDQVNVAEGNPLTVKCTYSVSGNPYLFWYVQYPNRGLQFLLKYITGDNLVKGSYGFEAEFNKSQTSFHLKKPSALVSDSALYFCAVRAPTSGTYKYIFGTGTRLKVLANIQNPDPAVYQLRDSKSSDKSVCLFTDFDSQTNVSQSKDSDVYITDKTVLDMRSMDFKSNSAVAWSNKSDFACANAFNNSIIPEDTFFPSPESSCDVKLVEKSFETDTNLNFQNLSVIGFRILLLKVAGFNLLMTLRLWSS

SEQ ID NO: 55 - DNA, 405 bp, Artificial Sequence
  TCR Valpha sequence
atggcctctgcacccatctcgatgcttgcgatgctcttcacattgagtgggctgagagctcagtcagtggctcagccggaagatcaggtcaacgttgctgaagggaatcctctgactgtgaaatgcacctattcagtctctggaaacccttatcttttttggtatgttcaataccccaaccgaggcctccagttccttctgaaatacatcacaggggataacctggttaaaggcagctatggctttgaagctgaatttaacaagagccaaacctccttccacctgaagaaaccatctgcccttgtgagcgactccgctttgtacttctgtgctgtgagagctcctacctcaggaacctacaaatacatctttggaacaggcaccaggctgaaggttttagcaaat

SEQ ID NO: 56 - DNA, 825 bp, Artificial Sequence
  TCR alpha chain sequence
atggcctctgcacccatctcgatgcttgcgatgctcttcacattgagtgggctgagagctcagtcagtggctcagccggaagatcaggtcaacgttgctgaagggaatcctctgactgtgaaatgcacctattcagtctctggaaacccttatcttttttggtatgttcaataccccaaccgaggcctccagttccttctgaaatacatcacaggggataacctggttaaaggcagctatggctttgaagctgaatttaacaagagccaaacctccttccacctgaagaaaccatctgcccttgtgagcgactccgctttgtacttctgtgctgtgagagctcctacctcaggaacctacaaatacatctttggaacaggcaccaggctgaaggttttagcaaatatccagaaccctgaccctgccgtgtaccagctgagagactctaaatccagtgacaagtctgtctgcctattcaccgattttgattctcaaacaaatgtgtcacaaagtaaggattctgatgtgtatatcacagacaaaactgtgctagacatgaggtctatggacttcaagagcaacagtgctgtggcctggagcaacaaatctgactttgcatgtgcaaacgccttcaacaacagcattattccagaagacaccttcttccccagcccagaaagttcctgtgatgtcaagctggtcgagaaaagctttgaaacagatacgaacctaaactttcaaaacctgtcagtgattgggttccgaatcctcctcctgaaagtggccgggtttaatctgctcatgacgctgcggctgtggtccagc

SEQ ID NO: 57 - protein, 11 aa, Artificial Sequence
  TCR Vbeta CDR-3 sequence
ASSLVSGNEQF

SEQ ID NO: 58 - protein, 114 aa, Artificial Sequence
  TCR Vbeta sequence
DTGVSQDPRHKITKRGQNVTFRCDPISEHNRLYWYRQTLGQGPEFLTYFQNEAQLEKSRLLSDRFSAERPKGSFSTLEIQRTEQGDSAMYLCASSLVSGNEQFFGPGTRLTVLE

SEQ ID NO: 59 - protein, 133 aa, Artificial Sequence
  TCR Vbeta sequence
MGTSLLCWMALCLLGADHADTGVSQDPRHKITKRGQNVTFRCDPISEHNRLYWYRQTLGQGPEFLTYFQNEAQLEKSRLLSDRFSAERPKGSFSTLEIQRTEQGDSAMYLCASSLVSGNEQFFGPGTRLTVLE

SEQ ID NO: 60 - protein, 311 aa, Artificial Sequence
  TCR beta chain sequence
MGTSLLCWMALCLLGADHADTGVSQDPRHKITKRGQNVTFRCDPISEHNRLYWYRQTLGQGPEFLTYFQNEAQLEKSRLLSDRFSAERPKGSFSTLEIQRTEQGDSAMYLCASSLVSGNEQFFGPGTRLTVLEDLKNVFPPEVAVFEPSEAEISHTQKATLVCLATGFYPDHVELSWWVNGKEVHSGVSTDPQPLKEQPALNDSRYCLSSRLRVSATFWQNPRNHFRCQVQFYGLSENDEWTQDRAKPVTQIVSAEAWGRADCGFTSESYQQGVLSATILYEILLGKATLYAVLVSALVLMAMVKRKDSRG

SEQ ID NO: 61 - DNA, 399 bp, Artificial Sequence
  TCR Vbeta sequence
atgggtaccagcctcctctgctggatggccctgtgtctcctgggggcagatcacgcagatactggagtctcccaggaccccagacacaagatcacaaagaggggacagaatgtaactttcaggtgtgatccaatttctgaacacaaccgcctttattggtaccgacagaccctggggcagggcccagagtttctgacttacttccagaatgaagctcaactagaaaaatcaaggctgctcagtgatcggttctctgcagagaggcctaagggatctttctccaccttggagatccagcgcacagagcagggggactcggccatgtatctctgtgccagcagcttagtctcgggcaatgagcagttcttcgggccagggacacggctcaccgtgctagag

SEQ ID NO: 62 - DNA, 936 bp, Artificial Sequence
  TCR beta chain sequence
atgggtaccagcctcctctgctggatggccctgtgtctcctgggggcagatcacgcagatactggagtctcccaggaccccagacacaagatcacaaagaggggacagaatgtaactttcaggtgtgatccaatttctgaacacaaccgcctttattggtaccgacagaccctggggcagggcccagagtttctgacttacttccagaatgaagctcaactagaaaaatcaaggctgctcagtgatcggttctctgcagagaggcctaagggatctttctccaccttggagatccagcgcacagagcagggggactcggccatgtatctctgtgccagcagcttagtctcgggcaatgagcagttcttcgggccagggacacggctcaccgtgctagaggacctgaaaaacgtgttcccacccgaggtcgctgtgtttgagccatcagaagcagagatctcccacacccaaaaggccacactggtatgcctggccacaggcttctaccccgaccacgtggagctgagctggtgggtgaatgggaaggaggtgcacagtggggtcagcacagacccgcagcccctcaaggagcagcccgccctcaatgactccagatactgcctgagcagccgcctgagggtctcggccaccttctggcagaacccccgcaaccacttccgctgtcaagtccagttctacgggctctcggagaatgacgagtggacccaggatagggccaaacctgtcacccagatcgtcagcgccgaggcctggggtagagcagactgtggcttcacctccgagtcttaccagcaaggggtcctgtctgccaccatcctctatgagatcttgctagggaaggccaccttgtatgccgtgctggtcagtgccctcgtgctgatggccatggtcaagagaaaggattccagaggctag

SEQ ID NO: 63 - DNA, 1827 bp, Artificial Sequence
  TCR sequence
atggcctctgcacccatctcgatgcttgcgatgctcttcacattgagtgggctgagagctcagtcagtggctcagccggaagatcaggtcaacgttgctgaagggaatcctctgactgtgaaatgcacctattcagtctctggaaacccttatcttttttggtatgttcaataccccaaccgaggcctccagttccttctgaaatacatcacaggggataacctggttaaaggcagctatggctttgaagctgaatttaacaagagccaaacctccttccacctgaagaaaccatctgcccttgtgagcgactccgctttgtacttctgtgctgtgagagctcctacctcaggaacctacaaatacatctttggaacaggcaccaggctgaaggttttagcaaatatccagaaccctgaccctgccgtgtaccagctgagagactctaaatccagtgacaagtctgtctgcctattcaccgattttgattctcaaacaaatgtgtcacaaagtaaggattctgatgtgtatatcacagacaaaactgtgctagacatgaggtctatggacttcaagagcaacagtgctgtggcctggagcaacaaatctgactttgcatgtgcaaacgccttcaacaacagcattattccagaagacaccttcttccccagcccagaaagttcctgtgatgtcaagctggtcgagaaaagctttgaaacagatacgaacctaaactttcaaaacctgtcagtgattgggttccgaatcctcctcctgaaagtggccgggtttaatctgctcatgacgctgcggctgtggtccagcggctccggagccacgaacttctctctgttaaagcaagcaggagacgtggaagaaaaccccggtcccatgggtaccagcctcctctgctggatggccctgtgtctcctgggggcagatcacgcagatactggagtctcccaggaccccagacacaagatcacaaagaggggacagaatgtaactttcaggtgtgatccaatttctgaacacaaccgcctttattggtaccgacagaccctggggcagggcccagagtttctgacttacttccagaatgaagctcaactagaaaaatcaaggctgctcagtgatcggttctctgcagagaggcctaagggatctttctccaccttggagatccagcgcacagagcagggggactcggccatgtatctctgtgccagcagcttagtctcgggcaatgagcagttcttcgggccagggacacggctcaccgtgctagaggacctgaaaaacgtgttcccacccgaggtcgctgtgtttgagccatcagaagcagagatctcccacacccaaaaggccacactggtatgcctggccacaggcttctaccccgaccacgtggagctgagctggtgggtgaatgggaaggaggtgcacagtggggtcagcacagacccgcagcccctcaaggagcagcccgccctcaatgactccagatactgcctgagcagccgcctgagggtctcggccaccttctggcagaacccccgcaaccacttccgctgtcaagtccagttctacgggctctcggagaatgacgagtggacccaggatagggccaaacctgtcacccagatcgtcagcgccgaggcctggggtagagcagactgtggcttcacctccgagtcttaccagcaaggggtcctgtctgccaccatcctctatgagatcttgctagggaaggccaccttgtatgccgtgctggtcagtgccctcgtgctgatggccatggtcaagagaaaggattccagaggctag

SEQ ID NO: 64 - protein, 608 aa, Artificial Sequence
  TCR sequence
MASAPISMLAMLFTLSGLRAQSVAQPEDQVNVAEGNPLTVKCTYSVSGNPYLFWYVQYPNRGLQFLLKYITGDNLVKGSYGFEAEFNKSQTSFHLKKPSALVSDSALYFCAVRAPTSGTYKYIFGTGTRLKVLANIQNPDPAVYQLRDSKSSDKSVCLFTDFDSQTNVSQSKDSDVYITDKTVLDMRSMDFKSNSAVAWSNKSDFACANAFNNSIIPEDTFFPSPESSCDVKLVEKSFETDTNLNFQNLSVIGFRILLLKVAGFNLLMTLRLWSSGSGATNFSLLKQAGDVEENPGPMGTSLLCWMALCLLGADHADTGVSQDPRHKITKRGQNVTFRCDPISEHNRLYWYRQTLGQGPEFLTYFQNEAQLEKSRLLSDRFSAERPKGSFSTLEIQRTEQGDSAMYLCASSLVSGNEQFFGPGTRLTVLEDLKNVFPPEVAVFEPSEAEISHTQKATLVCLATGFYPDHVELSWWVNGKEVHSGVSTDPQPLKEQPALNDSRYCLSSRLRVSATFWQNPRNHFRCQVQFYGLSENDEWTQDRAKPVTQIVSAEAWGRADCGFTSESYQQGVLSATILYEILLGKATLYAVLVSALVLMAMVKRKDSRG

SEQ ID NO: 65 - protein, 13 aa, Artificial Sequence
  TCR Valpha CDR-3 sequence
AVRGPTSGTYKYI

SEQ ID NO: 66 - protein, 116 aa, Artificial Sequence
  TCR Valpha sequence
AQSVAQPEDQVNVAEGNPLTVKCTYSVSGNPYLFWYVQYPNRGLQFLLKYITGDNLVKGSYGFEAEFNKSQTSFHLKKPSALVSDSALYFCAVRGPTSGTYKYIFGTGTRLKVLAN

SEQ ID NO: 67 - protein, 135 aa, Artificial Sequence
  TCR Valpha sequence
MASAPISMLAMLFTLSGLRAQSVAQPEDQVNVAEGNPLTVKCTYSVSGNPYLFWYVQYPNRGLQFLLKYITGDNLVKGSYGFEAEFNKSQTSFHLKKPSALVSDSALYFCAVRGPTSGTYKYIFGTGTRLKVLAN

SEQ ID NO: 68 - protein, 275 aa, Artificial Sequence
  TCR alpha chain sequence
MASAPISMLAMLFTLSGLRAQSVAQPEDQVNVAEGNPLTVKCTYSVSGNPYLFWYVQYPNRGLQFLLKYITGDNLVKGSYGFEAEFNKSQTSFHLKKPSALVSDSALYFCAVRGPTSGTYKYIFGTGTRLKVLANIQNPDPAVYQLRDSKSSDKSVCLFTDFDSQTNVSQSKDSDVYITDKTVLDMRSMDFKSNSAVAWSNKSDFACANAFNNSIIPEDTFFPSPESSCDVKLVEKSFETDTNLNFQNLSVIGFRILLLKVAGFNLLMTLRLWSS

SEQ ID NO: 69 - DNA, 405 bp, Artificial Sequence
  TCR Valpha sequence
atggcctctgcacccatctcgatgcttgcgatgctcttcacattgagtgggctgagagctcagtcagtggctcagccggaagatcaggtcaacgttgctgaagggaatcctctgactgtgaaatgcacctattcagtctctggaaacccttatcttttttggtatgttcaataccccaaccgaggcctccagttccttctgaaatacatcacaggggataacctggttaaaggcagctatggctttgaagctgaatttaacaagagccaaacctccttccacctgaagaaaccatctgcccttgtgagcgactccgctttgtacttctgtgctgtgagagggcctacctcaggaacctacaaatacatctttggaacaggcaccaggctgaaggttttagcaaat

SEQ ID NO: 70 - DNA, 825 bp, Artificial Sequence
  TCR alpha chain sequence
atggcctctgcacccatctcgatgcttgcgatgctcttcacattgagtgggctgagagctcagtcagtggctcagccggaagatcaggtcaacgttgctgaagggaatcctctgactgtgaaatgcacctattcagtctctggaaacccttatcttttttggtatgttcaataccccaaccgaggcctccagttccttctgaaatacatcacaggggataacctggttaaaggcagctatggctttgaagctgaatttaacaagagccaaacctccttccacctgaagaaaccatctgcccttgtgagcgactccgctttgtacttctgtgctgtgagagggcctacctcaggaacctacaaatacatctttggaacaggcaccaggctgaaggttttagcaaatatccagaaccctgaccctgccgtgtaccagctgagagactctaaatccagtgacaagtctgtctgcctattcaccgattttgattctcaaacaaatgtgtcacaaagtaaggattctgatgtgtatatcacagacaaaactgtgctagacatgaggtctatggacttcaagagcaacagtgctgtggcctggagcaacaaatctgactttgcatgtgcaaacgccttcaacaacagcattattccagaagacaccttcttccccagcccagaaagttcctgtgatgtcaagctggtcgagaaaagctttgaaacagatacgaacctaaactttcaaaacctgtcagtgattgggttccgaatcctcctcctgaaagtggccgggtttaatctgctcatgacgctgcggctgtggtccagc

SEQ ID NO: 71 - protein, 309 aa, Artificial Sequence
  TCR beta chain sequence
MGTSLLCWMALCLLGADHADTGVSQDPRHKITKRGQNVTFRCDPISEHNRLYWYRQTLGQGPEFLTYFQNEAQLEKSRLLSDRFSAERPKGSFSTLEIQRTEQGDSAMYLCASSLVSGNEQFFGPGTRLTVLEDLNKVFPPEVAVFEPSEAEISHTQKATLVCLATGFFPDHVELSWWVNGKEVHSGVSTDPQPLKEQPALNDSRYCLSSRLRVSATFWQNPRNHFRCQVQFYGLSENDEWTQDRAKPVTQIVSAEAWGRADCGFTSVSYQQGVLSATILYEILLGKATLYAVLVSALVLMAMVKRKDF

SEQ ID NO: 72 - DNA, 399 bp, Artificial Sequence
  TCR Vbeta sequence
atgggtaccagcctcctctgctggatggccctgtgtctcctgggggcagatcacgcagatactggagtctcccaggaccccagacacaagatcacaaagaggggacagaatgtaactttcaggtgtgatccaatttctgaacacaaccgcctttattggtaccgacagaccctggggcagggcccagagtttctgacttacttccagaatgaagctcaactagaaaaatcaaggctgctcagtgatcggttctctgcagagaggcctaagggatctttctccaccttggagatccagcgcacagagcagggggactcggccatgtatctctgtgccagcagcttagtaagcggaaatgagcagttcttcgggccagggacacggctcaccgtgctagag

SEQ ID NO: 73 - DNA, 930 bp, Artificial Sequence
  TCR beta chain sequence
atgggtaccagcctcctctgctggatggccctgtgtctcctgggggcagatcacgcagatactggagtctcccaggaccccagacacaagatcacaaagaggggacagaatgtaactttcaggtgtgatccaatttctgaacacaaccgcctttattggtaccgacagaccctggggcagggcccagagtttctgacttacttccagaatgaagctcaactagaaaaatcaaggctgctcagtgatcggttctctgcagagaggcctaagggatctttctccaccttggagatccagcgcacagagcagggggactcggccatgtatctctgtgccagcagcttagtaagcggaaatgagcagttcttcgggccagggacacggctcaccgtgctagaggacctgaacaaggtgttcccacccgaggtcgctgtgtttgagccatcagaagcagagatctcccacacccaaaaggccacactggtgtgcctggccacaggcttcttccccgaccacgtggagctgagctggtgggtgaatgggaaggaggtgcacagtggggtcagcacagacccgcagcccctcaaggagcagcccgccctcaatgactccagatactgcctgagcagccgcctgagggtctcggccaccttctggcagaacccccgcaaccacttccgctgtcaagtccagttctacgggctctcggagaatgacgagtggacccaggatagggccaaacccgtcacccagatcgtcagcgccgaggcctggggtagagcagactgtggctttacctcggtgtcctaccagcaaggggtcctgtctgccaccatcctctatgagatcctgctagggaaggccaccctgtatgctgtgctggtcagcgcccttgtgttgatggccatggtcaagagaaaggatttctga

SEQ ID NO: 74 - DNA, 1821 bp, Artificial Sequence
  TCR sequence
atggcctctgcacccatctcgatgcttgcgatgctcttcacattgagtgggctgagagctcagtcagtggctcagccggaagatcaggtcaacgttgctgaagggaatcctctgactgtgaaatgcacctattcagtctctggaaacccttatcttttttggtatgttcaataccccaaccgaggcctccagttccttctgaaatacatcacaggggataacctggttaaaggcagctatggctttgaagctgaatttaacaagagccaaacctccttccacctgaagaaaccatctgcccttgtgagcgactccgctttgtacttctgtgctgtgagagggcctacctcaggaacctacaaatacatctttggaacaggcaccaggctgaaggttttagcaaatatccagaaccctgaccctgccgtgtaccagctgagagactctaaatccagtgacaagtctgtctgcctattcaccgattttgattctcaaacaaatgtgtcacaaagtaaggattctgatgtgtatatcacagacaaaactgtgctagacatgaggtctatggacttcaagagcaacagtgctgtggcctggagcaacaaatctgactttgcatgtgcaaacgccttcaacaacagcattattccagaagacaccttcttccccagcccagaaagttcctgtgatgtcaagctggtcgagaaaagctttgaaacagatacgaacctaaactttcaaaacctgtcagtgattgggttccgaatcctcctcctgaaagtggccgggtttaatctgctcatgacgctgcggctgtggtccagcggctccggagccacgaacttctctctgttaaagcaagcaggagacgtggaagaaaaccccggtcccatgggtaccagcctcctctgctggatggccctgtgtctcctgggggcagatcacgcagatactggagtctcccaggaccccagacacaagatcacaaagaggggacagaatgtaactttcaggtgtgatccaatttctgaacacaaccgcctttattggtaccgacagaccctggggcagggcccagagtttctgacttacttccagaatgaagctcaactagaaaaatcaaggctgctcagtgatcggttctctgcagagaggcctaagggatctttctccaccttggagatccagcgcacagagcagggggactcggccatgtatctctgtgccagcagcttagtaagcggaaatgagcagttcttcgggccagggacacggctcaccgtgctagaggacctgaacaaggtgttcccacccgaggtcgctgtgtttgagccatcagaagcagagatctcccacacccaaaaggccacactggtgtgcctggccacaggcttcttccccgaccacgtggagctgagctggtgggtgaatgggaaggaggtgcacagtggggtcagcacagacccgcagcccctcaaggagcagcccgccctcaatgactccagatactgcctgagcagccgcctgagggtctcggccaccttctggcagaacccccgcaaccacttccgctgtcaagtccagttctacgggctctcggagaatgacgagtggacccaggatagggccaaacccgtcacccagatcgtcagcgccgaggcctggggtagagcagactgtggctttacctcggtgtcctaccagcaaggggtcctgtctgccaccatcctctatgagatcctgctagggaaggccaccctgtatgctgtgctggtcagcgcccttgtgttgatggccatggtcaagagaaaggatttctga

SEQ ID NO: 75 - protein, 606 aa, Artificial Sequence
  TCR sequence
MASAPISMLAMLFTLSGLRAQSVAQPEDQVNVAEGNPLTVKCTYSVSGNPYLFWYVQYPNRGLQFLLKYITGDNLVKGSYGFEAEFNKSQTSFHLKKPSALVSDSALYFCAVRGPTSGTYKYIFGTGTRLKVLANIQNPDPAVYQLRDSKSSDKSVCLFTDFDSQTNVSQSKDSDVYITDKTVLDMRSMDFKSNSAVAWSNKSDFACANAFNNSIIPEDTFFPSPESSCDVKLVEKSFETDTNLNFQNLSVIGFRILLLKVAGFNLLMTLRLWSSGSGATNFSLLKQAGDVEENPGPMGTSLLCWMALCLLGADHADTGVSQDPRHKITKRGQNVTFRCDPISEHNRLYWYRQTLGQGPEFLTYFQNEAQLEKSRLLSDRFSAERPKGSFSTLEIQRTEQGDSAMYLCASSLVSGNEQFFGPGTRLTVLEDLNKVFPPEVAVFEPSEAEISHTQKATLVCLATGFFPDHVELSWWVNGKEVHSGVSTDPQPLKEQPALNDSRYCLSSRLRVSATFWQNPRNHFRCQVQFYGLSENDEWTQDRAKPVTQIVSAEAWGRADCGFTSVSYQQGVLSATILYEILLGKATLYAVLVSALVLMAMVKRKDF

SEQ ID NO: 76 - protein, 6 aa, Artificial Sequence
  TCR Valpha CDR-1 sequence
DSASNY

SEQ ID NO: 77 - protein, 7 aa, Artificial Sequence
  TCR Valpha CDR-2 sequence
IRSNVGE

SEQ ID NO: 78 - protein, 12 aa, Artificial Sequence
  TCR Valpha CDR-3 sequence
AAHLTGGGNKLT

SEQ ID NO: 79 - protein, 114 aa, Artificial Sequence
  TCR Valpha sequence
GENVEQHPSTLSVQEGDSAVIKCTYSDSASNYFPWYKQELGKRPQLIIDIRSNVGEKKDQRIAVTLNKTAKHFSLHITETQPEDSAVYFCAAHLTGGGNKLTFGTGTQLKVELN

SEQ ID NO: 80 - protein, 132 aa, Artificial Sequence
  TCR Valpha sequence
MSIRAVFIFLWLQLDLVNGENVEQHPSTLSVQEGDSAVIKCTYSDSASNYFPWYKQELGKRPQLIIDIRSNVGEKKDQRIAVTLNKTAKHFSLHITETQPEDSAVYFCAAHLTGGGNKLTFGTGTQLKVELN

SEQ ID NO: 81 - protein, 272 aa, Artificial Sequence
  TCR alpha chain sequence
MSIRAVFIFLWLQLDLVNGENVEQHPSTLSVQEGDSAVIKCTYSDSASNYFPWYKQELGKRPQLIIDIRSNVGEKKDQRIAVTLNKTAKHFSLHITETQPEDSAVYFCAAHLTGGGNKLTFGTGTQLKVELNIQKPDPAVYQLRDSKSSDKSVCLFTDFDSQTNVSQSKDSDVYITDKTVLDMRSMDFKSNSAVAWSNKSDFACANAFNNSIIPEDTFFPSPESSCDVKLVEKSFETDTNLNFQNLSVIGFRILLLKVAGFNLLMTLRLWSS

SEQ ID NO: 82 - DNA, 396 bp, Artificial Sequence
  TCR Valpha sequence
atgtccattcgagctgtatttatattcctgtggctgcagctggacttggtgaatggagagaatgtggagcagcatccttcaaccctgagtgtccaggagggagacagcgctgttatcaagtgtacttattcagacagtgcctcaaactacttcccttggtataagcaagaacttggaaaaagacctcagcttattatagacattcgttcaaatgtgggcgaaaagaaagaccaacgaattgctgttacattgaacaagacagccaaacatttctccctgcacatcacagagacccaacctgaagactcggctgtctacttctgtgcagcacatctgacgggaggaggaaacaaactcacctttgggacaggcactcagctaaaagtggaactcaat

SEQ ID NO: 83 - DNA, 816 bp, Artificial Sequence
  TCR alpha chain sequence
atgtccattcgagctgtatttatattcctgtggctgcagctggacttggtgaatggagagaatgtggagcagcatccttcaaccctgagtgtccaggagggagacagcgctgttatcaagtgtacttattcagacagtgcctcaaactacttcccttggtataagcaagaacttggaaaaagacctcagcttattatagacattcgttcaaatgtgggcgaaaagaaagaccaacgaattgctgttacattgaacaagacagccaaacatttctccctgcacatcacagagacccaacctgaagactcggctgtctacttctgtgcagcacatctgacgggaggaggaaacaaactcacctttgggacaggcactcagctaaaagtggaactcaatatccagaagcctgaccctgccgtgtaccagctgagagactctaaatccagtgacaagtctgtctgcctattcaccgattttgattctcaaacaaatgtgtcacaaagtaaggattctgatgtgtatatcacagacaaaactgtgctagacatgaggtctatggacttcaagagcaacagtgctgtggcctggagcaacaaatctgactttgcatgtgcaaacgccttcaacaacagcattattccagaagacaccttcttccccagcccagaaagttcctgtgatgtcaagctggtcgagaaaagctttgaaacagatacgaacctaaactttcaaaacctgtcagtgattgggttccgaatcctcctcctgaaagtggccgggtttaatctgctcatgacgctgcggctgtggtccagc

SEQ ID NO: 84 - protein, 12 aa, Artificial Sequence
  TCR Vbeta CDR-3 sequence
ASSSRAGGETQY

SEQ ID NO: 85 - protein, 115 aa, Artificial Sequence
  TCR Vbeta sequence
DTGVSQDPRHKITKRGQNVTFRCDPISEHNRLYWYRQTLGQGPEFLTYFQNEAQLEKSRLLSDRFSAERPKGSFSTLEIQRTEQGDSAMYLCASSSRAGGETQYFGPGTRLLVLE

SEQ ID NO: 86 - protein, 134 aa, Artificial Sequence
  TCR Vbeta sequence
MGTSLLCWMALCLLGADHADTGVSQDPRHKITKRGQNVTFRCDPISEHNRLYWYRQTLGQGPEFLTYFQNEAQLEKSRLLSDRFSAERPKGSFSTLEIQRTEQGDSAMYLCASSSRAGGETQYFGPGTRLLVLE

SEQ ID NO: 87 - protein, 312 aa, Artificial Sequence
  TCR beta chain sequence
MGTSLLCWMALCLLGADHADTGVSQDPRHKITKRGQNVTFRCDPISEHNRLYWYRQTLGQGPEFLTYFQNEAQLEKSRLLSDRFSAERPKGSFSTLEIQRTEQGDSAMYLCASSSRAGGETQYFGPGTRLLVLEDLKNVFPPEVAVFEPSEAEISHTQKATLVCLATGFYPDHVELSWWVNGKEVHSGVSTDPQPLKEQPALNDSRYCLSSRLRVSATFWQNPRNHFRCQVQFYGLSENDEWTQDRAKPVTQIVSAEAWGRADCGFTSESYQQGVLSATILYEILLGKATLYAVLVSALVLMAMVKRKDSRG

SEQ ID NO: 88 - DNA, 402 bp, Artificial Sequence
  TCR Vbeta sequence
atgggtaccagcctcctctgctggatggccctgtgtctcctgggggcagatcacgcagatactggagtctcccaggaccccagacacaagatcacaaagaggggacagaatgtaactttcaggtgtgatccaatttctgaacacaaccgcctttattggtaccgacagaccctggggcagggcccagagtttctgacttacttccagaatgaagctcaactagaaaaatcaaggctgctcagtgatcggttctctgcagagaggcctaagggatctttctccaccttggagatccagcgcacagagcagggggactcggccatgtatctctgtgccagcagctcccgggccggaggggagacccagtacttcgggccaggcacgcggctcctggtgctcgag

SEQ ID NO: 89 - DNA, 939 bp, Artificial Sequence
  TCR beta chain sequence
atgggtaccagcctcctctgctggatggccctgtgtctcctgggggcagatcacgcagatactggagtctcccaggaccccagacacaagatcacaaagaggggacagaatgtaactttcaggtgtgatccaatttctgaacacaaccgcctttattggtaccgacagaccctggggcagggcccagagtttctgacttacttccagaatgaagctcaactagaaaaatcaaggctgctcagtgatcggttctctgcagagaggcctaagggatctttctccaccttggagatccagcgcacagagcagggggactcggccatgtatctctgtgccagcagctcccgggccggaggggagacccagtacttcgggccaggcacgcggctcctggtgctcgaggacctgaaaaacgtgttcccacccgaggtcgctgtgtttgagccatcagaagcagagatctcccacacccaaaaggccacactggtatgcctggccacaggcttctaccccgaccacgtggagctgagctggtgggtgaatgggaaggaggtgcacagtggggtcagcacagacccgcagcccctcaaggagcagcccgccctcaatgactccagatactgcctgagcagccgcctgagggtctcggccaccttctggcagaacccccgcaaccacttccgctgtcaagtccagttctacgggctctcggagaatgacgagtggacccaggatagggccaaacctgtcacccagatcgtcagcgccgaggcctggggtagagcagactgtggcttcacctccgagtcttaccagcaaggggtcctgtctgccaccatcctctatgagatcttgctagggaaggccaccttgtatgccgtgctggtcagtgccctcgtgctgatggccatggtcaagagaaaggattccagaggctag

SEQ ID NO: 90 - DNA, 1821 bp, Artificial Sequence
  TCR sequence
atgtccattcgagctgtatttatattcctgtggctgcagctggacttggtgaatggagagaatgtggagcagcatccttcaaccctgagtgtccaggagggagacagcgctgttatcaagtgtacttattcagacagtgcctcaaactacttcccttggtataagcaagaacttggaaaaagacctcagcttattatagacattcgttcaaatgtgggcgaaaagaaagaccaacgaattgctgttacattgaacaagacagccaaacatttctccctgcacatcacagagacccaacctgaagactcggctgtctacttctgtgcagcacatctgacgggaggaggaaacaaactcacctttgggacaggcactcagctaaaagtggaactcaatatccagaagcctgaccctgccgtgtaccagctgagagactctaaatccagtgacaagtctgtctgcctattcaccgattttgattctcaaacaaatgtgtcacaaagtaaggattctgatgtgtatatcacagacaaaactgtgctagacatgaggtctatggacttcaagagcaacagtgctgtggcctggagcaacaaatctgactttgcatgtgcaaacgccttcaacaacagcattattccagaagacaccttcttccccagcccagaaagttcctgtgatgtcaagctggtcgagaaaagctttgaaacagatacgaacctaaactttcaaaacctgtcagtgattgggttccgaatcctcctcctgaaagtggccgggtttaatctgctcatgacgctgcggctgtggtccagcggctccggagccacgaacttctctctgttaaagcaagcaggagacgtggaagaaaaccccggtcccatgggtaccagcctcctctgctggatggccctgtgtctcctgggggcagatcacgcagatactggagtctcccaggaccccagacacaagatcacaaagaggggacagaatgtaactttcaggtgtgatccaatttctgaacacaaccgcctttattggtaccgacagaccctggggcagggcccagagtttctgacttacttccagaatgaagctcaactagaaaaatcaaggctgctcagtgatcggttctctgcagagaggcctaagggatctttctccaccttggagatccagcgcacagagcagggggactcggccatgtatctctgtgccagcagctcccgggccggaggggagacccagtacttcgggccaggcacgcggctcctggtgctcgaggacctgaaaaacgtgttcccacccgaggtcgctgtgtttgagccatcagaagcagagatctcccacacccaaaaggccacactggtatgcctggccacaggcttctaccccgaccacgtggagctgagctggtgggtgaatgggaaggaggtgcacagtggggtcagcacagacccgcagcccctcaaggagcagcccgccctcaatgactccagatactgcctgagcagccgcctgagggtctcggccaccttctggcagaacccccgcaaccacttccgctgtcaagtccagttctacgggctctcggagaatgacgagtggacccaggatagggccaaacctgtcacccagatcgtcagcgccgaggcctggggtagagcagactgtggcttcacctccgagtcttaccagcaaggggtcctgtctgccaccatcctctatgagatcttgctagggaaggccaccttgtatgccgtgctggtcagtgccctcgtgctgatggccatggtcaagagaaaggattccagaggctag

SEQ ID NO: 91 - protein, 606 aa, Artificial Sequence
  TCR sequence
MSIRAVFIFLWLQLDLVNGENVEQHPSTLSVQEGDSAVIKCTYSDSASNYFPWYKQELGKRPQLIIDIRSNVGEKKDQRIAVTLNKTAKHFSLHITETQPEDSAVYFCAAHLTGGGNKLTFGTGTQLKVELNIQKPDPAVYQLRDSKSSDKSVCLFTDFDSQTNVSQSKDSDVYITDKTVLDMRSMDFKSNSAVAWSNKSDFACANAFNNSIIPEDTFFPSPESSCDVKLVEKSFETDTNLNFQNLSVIGFRILLLKVAGFNLLMTLRLWSSGSGATNFSLLKQAGDVEENPGPMGTSLLCWMALCLLGADHADTGVSQDPRHKITKRGQNVTFRCDPISEHNRLYWYRQTLGQGPEFLTYFQNEAQLEKSRLLSDRFSAERPKGSFSTLEIQRTEQGDSAMYLCASSSRAGGETQYFGPGTRLLVLEDLKNVFPPEVAVFEPSEAEISHTQKATLVCLATGFYPDHVELSWWVNGKEVHSGVSTDPQPLKEQPALNDSRYCLSSRLRVSATFWQNPRNHFRCQVQFYGLSENDEWTQDRAKPVTQIVSAEAWGRADCGFTSESYQQGVLSATILYEILLGKATLYAVLVSALVLMAMVKRKDSRG

SEQ ID NO: 92 - protein, 9 aa, Artificial Sequence
  TCR Valpha CDR-3 sequence
AGTGANNLF

SEQ ID NO: 93 - protein, 109 aa, Artificial Sequence
  TCR Valpha sequence
SQQGEEDPQALSIQEGENATMNCSYKTSINNLQWYRQNSGRGLVHLILIRSNEREKHSGRLRVTLDTSKKSSSLLITASRAADTASYFCAGTGANNLFFGTGTRLTVIP

SEQ ID NO: 94 - protein, 129 aa, Artificial Sequence
  TCR Valpha sequence
METLLGVSLVILWLQLARVNSQQGEEDPQALSIQEGENATMNCSYKTSINNLQWYRQNSGRGLVHLILIRSNEREKHSGRLRVTLDTSKKSSSLLITASRAADTASYFCAGTGANNLFFGTGTRLTVIP

SEQ ID NO: 95 - protein, 270 aa, Artificial Sequence
  TCR alpha chain sequence
METLLGVSLVILWLQLARVNSQQGEEDPQALSIQEGENATMNCSYKTSINNLQWYRQNSGRGLVHLILIRSNEREKHSGRLRVTLDTSKKSSSLLITASRAADTASYFCAGTGANNLFFGTGTRLTVIPYIQKPDPAVYQLRDSKSSDKSVCLFTDFDSQTNVSQSKDSDVYITDKTVLDMRSMDFKSNSAVAWSNKSDFACANAFNNSIIPEDTFFPSPESSCDVKLVEKSFETDTNLNFQNLSVIGFRILLLKVAGFNLLMTLRLWSS

SEQ ID NO: 96 - DNA, 390 bp, Artificial Sequence
  TCR Valpha sequence
atggaaactctcctgggagtgtctttggtgattctatggcttcaactggctagggtgaacagtcaacagggagaagaggatcctcaggccttgagcatccaggagggtgaaaatgccaccatgaactgcagttacaaaactagtataaacaatttacagtggtatagacaaaattcaggtagaggccttgtccacctaattttaatacgttcaaatgaaagagagaaacacagtggaagattaagagtcacgcttgacacttccaagaaaagcagttccttgttgatcacggcttcccgggcagcagacactgcttcttacttctgtgctggaactggggcaaacaacctcttctttgggactggaacgagactcaccgttattccctat

SEQ ID NO: 97 - DNA, 810 bp, Artificial Sequence
  TCR alpha chain sequence
atggaaactctcctgggagtgtctttggtgattctatggcttcaactggctagggtgaacagtcaacagggagaagaggatcctcaggccttgagcatccaggagggtgaaaatgccaccatgaactgcagttacaaaactagtataaacaatttacagtggtatagacaaaattcaggtagaggccttgtccacctaattttaatacgttcaaatgaaagagagaaacacagtggaagattaagagtcacgcttgacacttccaagaaaagcagttccttgttgatcacggcttcccgggcagcagacactgcttcttacttctgtgctggaactggggcaaacaacctcttctttgggactggaacgagactcaccgttattccctatatccagaagcctgaccctgccgtgtaccagctgagagactctaaatccagtgacaagtctgtctgcctattcaccgattttgattctcaaacaaatgtgtcacaaagtaaggattctgatgtgtatatcacagacaaaactgtgctagacatgaggtctatggacttcaagagcaacagtgctgtggcctggagcaacaaatctgactttgcatgtgcaaacgccttcaacaacagcattattccagaagacaccttcttccccagcccagaaagttcctgtgatgtcaagctggtcgagaaaagctttgaaacagatacgaacctaaactttcaaaacctgtcagtgattgggttccgaatcctcctcctgaaagtggccgggtttaatctgctcatgacgctgcggctgtggtccagc

SEQ ID NO: 98 - protein, 11 aa, Artificial Sequence
  TCR Vbeta CDR-3 sequence
ASSLIRGETQY

SEQ ID NO: 99 - protein, 114 aa, Artificial Sequence
  TCR Vbeta sequence
DTGVSQDPRHKITKRGQNVTFRCDPISEHNRLYWYRQTLGQGPEFLTYFQNEAQLEKSRLLSDRFSAERPKGSFSTLEIQRTEQGDSAMYLCASSLIRGETQYFGPGTRLLVLE

SEQ ID NO: 100 - protein, 133 aa, Artificial Sequence
  TCR Vbeta sequence
MGTSLLCWMALCLLGADHADTGVSQDPRHKITKRGQNVTFRCDPISEHNRLYWYRQTLGQGPEFLTYFQNEAQLEKSRLLSDRFSAERPKGSFSTLEIQRTEQGDSAMYLCASSLIRGETQYFGPGTRLLVLE

SEQ ID NO: 101 - protein, 311 aa, Artificial Sequence
  TCR beta chain sequence
MGTSLLCWMALCLLGADHADTGVSQDPRHKITKRGQNVTFRCDPISEHNRLYWYRQTLGQGPEFLTYFQNEAQLEKSRLLSDRFSAERPKGSFSTLEIQRTEQGDSAMYLCASSLIRGETQYFGPGTRLLVLEDLKNVFPPEVAVFEPSEAEISHTQKATLVCLATGFYPDHVELSWWVNGKEVHSGVSTDPQPLKEQPALNDSRYCLSSRLRVSATFWQNPRNHFRCQVQFYGLSENDEWTQDRAKPVTQIVSAEAWGRADCGFTSESYQQGVLSATILYEILLGKATLYAVLVSALVLMAMVKRKDSRG

SEQ ID NO: 102 - DNA, 399 bp, Artificial Sequence
  TCR Vbeta sequence
atgggtaccagcctcctctgctggatggccctgtgtctcctgggggcagatcacgcagatactggagtctcccaggaccccagacacaagatcacaaagaggggacagaatgtaactttcaggtgtgatccaatttctgaacacaaccgcctttattggtaccgacagaccctggggcagggcccagagtttctgacttacttccagaatgaagctcaactagaaaaatcaaggctgctcagtgatcggttctctgcagagaggcctaagggatctttctccaccttggagatccagcgcacagagcagggggactcggccatgtatctctgtgccagcagcttaatcaggggagagacccagtacttcgggccaggcacgcggctcctggtgctcgag

SEQ ID NO: 103 - DNA, 936 bp, Artificial Sequence
  TCR beta chain sequence
atgggtaccagcctcctctgctggatggccctgtgtctcctgggggcagatcacgcagatactggagtctcccaggaccccagacacaagatcacaaagaggggacagaatgtaactttcaggtgtgatccaatttctgaacacaaccgcctttattggtaccgacagaccctggggcagggcccagagtttctgacttacttccagaatgaagctcaactagaaaaatcaaggctgctcagtgatcggttctctgcagagaggcctaagggatctttctccaccttggagatccagcgcacagagcagggggactcggccatgtatctctgtgccagcagcttaatcaggggagagacccagtacttcgggccaggcacgcggctcctggtgctcgaggacctgaaaaacgtgttcccacccgaggtcgctgtgtttgagccatcagaagcagagatctcccacacccaaaaggccacactggtatgcctggccacaggcttctaccccgaccacgtggagctgagctggtgggtgaatgggaaggaggtgcacagtggggtcagcacagacccgcagcccctcaaggagcagcccgccctcaatgactccagatactgcctgagcagccgcctgagggtctcggccaccttctggcagaacccccgcaaccacttccgctgtcaagtccagttctacgggctctcggagaatgacgagtggacccaggatagggccaaacctgtcacccagatcgtcagcgccgaggcctggggtagagcagactgtggcttcacctccgagtcttaccagcaaggggtcctgtctgccaccatcctctatgagatcttgctagggaaggccaccttgtatgccgtgctggtcagtgccctcgtgctgatggccatggtcaagagaaaggattccagaggctag

SEQ ID NO: 104 - DNA, 1812 bp, Artificial Sequence
  TCR sequence
atggaaactctcctgggagtgtctttggtgattctatggcttcaactggctagggtgaacagtcaacagggagaagaggatcctcaggccttgagcatccaggagggtgaaaatgccaccatgaactgcagttacaaaactagtataaacaatttacagtggtatagacaaaattcaggtagaggccttgtccacctaattttaatacgttcaaatgaaagagagaaacacagtggaagattaagagtcacgcttgacacttccaagaaaagcagttccttgttgatcacggcttcccgggcagcagacactgcttcttacttctgtgctggaactggggcaaacaacctcttctttgggactggaacgagactcaccgttattccctatatccagaagcctgaccctgccgtgtaccagctgagagactctaaatccagtgacaagtctgtctgcctattcaccgattttgattctcaaacaaatgtgtcacaaagtaaggattctgatgtgtatatcacagacaaaactgtgctagacatgaggtctatggacttcaagagcaacagtgctgtggcctggagcaacaaatctgactttgcatgtgcaaacgccttcaacaacagcattattccagaagacaccttcttccccagcccagaaagttcctgtgatgtcaagctggtcgagaaaagctttgaaacagatacgaacctaaactttcaaaacctgtcagtgattgggttccgaatcctcctcctgaaagtggccgggtttaatctgctcatgacgctgcggctgtggtccagcggctccggagccacgaacttctctctgttaaagcaagcaggagacgtggaagaaaaccccggtcccatgggtaccagcctcctctgctggatggccctgtgtctcctgggggcagatcacgcagatactggagtctcccaggaccccagacacaagatcacaaagaggggacagaatgtaactttcaggtgtgatccaatttctgaacacaaccgcctttattggtaccgacagaccctggggcagggcccagagtttctgacttacttccagaatgaagctcaactagaaaaatcaaggctgctcagtgatcggttctctgcagagaggcctaagggatctttctccaccttggagatccagcgcacagagcagggggactcggccatgtatctctgtgccagcagcttaatcaggggagagacccagtacttcgggccaggcacgcggctcctggtgctcgaggacctgaaaaacgtgttcccacccgaggtcgctgtgtttgagccatcagaagcagagatctcccacacccaaaaggccacactggtatgcctggccacaggcttctaccccgaccacgtggagctgagctggtgggtgaatgggaaggaggtgcacagtggggtcagcacagacccgcagcccctcaaggagcagcccgccctcaatgactccagatactgcctgagcagccgcctgagggtctcggccaccttctggcagaacccccgcaaccacttccgctgtcaagtccagttctacgggctctcggagaatgacgagtggacccaggatagggccaaacctgtcacccagatcgtcagcgccgaggcctggggtagagcagactgtggcttcacctccgagtcttaccagcaaggggtcctgtctgccaccatcctctatgagatcttgctagggaaggccaccttgtatgccgtgctggtcagtgccctcgtgctgatggccatggtcaagagaaaggattccagaggctag

SEQ ID NO: 105 - protein, 603 aa, Artificial Sequence
  TCR sequence
METLLGVSLVILWLQLARVNSQQGEEDPQALSIQEGENATMNCSYKTSINNLQWYRQNSGRGLVHLILIRSNEREKHSGRLRVTLDTSKKSSSLLITASRAADTASYFCAGTGANNLFFGTGTRLTVIPYIQKPDPAVYQLRDSKSSDKSVCLFTDFDSQTNVSQSKDSDVYITDKTVLDMRSMDFKSNSAVAWSNKSDFACANAFNNSIIPEDTFFPSPESSCDVKLVEKSFETDTNLNFQNLSVIGFRILLLKVAGFNLLMTLRLWSSGSGATNFSLLKQAGDVEENPGPMGTSLLCWMALCLLGADHADTGVSQDPRHKITKRGQNVTFRCDPISEHNRLYWYRQTLGQGPEFLTYFQNEAQLEKSRLLSDRFSAERPKGSFSTLEIQRTEQGDSAMYLCASSLIRGETQYFGPGTRLLVLEDLKNVFPPEVAVFEPSEAEISHTQKATLVCLATGFYPDHVELSWWVNGKEVHSGVSTDPQPLKEQPALNDSRYCLSSRLRVSATFWQNPRNHFRCQVQFYGLSENDEWTQDRAKPVTQIVSAEAWGRADCGFTSESYQQGVLSATILYEILLGKATLYAVLVSALVLMAMVKRKDSRG

SEQ ID NO: 106 - protein, 13 aa, Artificial Sequence
  TCR Valpha CDR-3 sequence
AAPLAGGGADGLT

SEQ ID NO: 107 - protein, 115 aa, Artificial Sequence
  TCR Valpha sequence
GENVEQHPSTLSVQEGDSAVIKCTYSDSASNYFPWYKQELGKRPQLIIDIRSNVGEKKDQRIAVTLNKTAKHFSLHITETQPEDSAVYFCAAPLAGGGADGLTFGKGTHLIIQPY

SEQ ID NO: 108 - protein, 133 aa, Artificial Sequence
  TCR Valpha sequence
MSIRAVFIFLWLQLDLVNGENVEQHPSTLSVQEGDSAVIKCTYSDSASNYFPWYKQELGKRPQLIIDIRSNVGEKKDQRIAVTLNKTAKHFSLHITETQPEDSAVYFCAAPLAGGGADGLTFGKGTHLIIQPY

SEQ ID NO: 109 - protein, 273 aa, Artificial Sequence
  TCR alpha chain sequence
MSIRAVFIFLWLQLDLVNGENVEQHPSTLSVQEGDSAVIKCTYSDSASNYFPWYKQELGKRPQLIIDIRSNVGEKKDQRIAVTLNKTAKHFSLHITETQPEDSAVYFCAAPLAGGGADGLTFGKGTHLIIQPYIQNPDPAVYQLRDSKSSDKSVCLFTDFDSQTNVSQSKDSDVYITDKTVLDMRSMDFKSNSAVAWSNKSDFACANAFNNSIIPEDTFFPSPESSCDVKLVEKSFETDTNLNFQNLSVIGFRILLLKVAGFNLLMTLRLWSS

SEQ ID NO: 110 - DNA, 399 bp, Artificial Sequence
  TCR Valpha sequence
atgtccattcgagctgtatttatattcctgtggctgcagctggacttggtgaatggagagaatgtggagcagcatccttcaaccctgagtgtccaggagggagacagcgctgttatcaagtgtacttattcagacagtgcctcaaactacttcccttggtataagcaagaacttggaaaaagacctcagcttattatagacattcgttcaaatgtgggcgaaaagaaagaccaacgaattgctgttacattgaacaagacagccaaacatttctccctgcacatcacagagacccaacctgaagactcggctgtctacttctgtgcagcacctttggcaggaggaggtgctgacggactcacctttggcaaagggactcatctaatcatccagccctat

SEQ ID NO: 111 - DNA, 819 bp, Artificial Sequence
  TCR alpha chain sequence
atgtccattcgagctgtatttatattcctgtggctgcagctggacttggtgaatggagagaatgtggagcagcatccttcaaccctgagtgtccaggagggagacagcgctgttatcaagtgtacttattcagacagtgcctcaaactacttcccttggtataagcaagaacttggaaaaagacctcagcttattatagacattcgttcaaatgtgggcgaaaagaaagaccaacgaattgctgttacattgaacaagacagccaaacatttctccctgcacatcacagagacccaacctgaagactcggctgtctacttctgtgcagcacctttggcaggaggaggtgctgacggactcacctttggcaaagggactcatctaatcatccagccctatatccagaaccctgaccctgccgtgtaccagctgagagactctaaatccagtgacaagtctgtctgcctattcaccgattttgattctcaaacaaatgtgtcacaaagtaaggattctgatgtgtatatcacagacaaaactgtgctagacatgaggtctatggacttcaagagcaacagtgctgtggcctggagcaacaaatctgactttgcatgtgcaaacgccttcaacaacagcattattccagaagacaccttcttccccagcccagaaagttcctgtgatgtcaagctggtcgagaaaagctttgaaacagatacgaacctaaactttcaaaacctgtcagtgattgggttccgaatcctcctcctgaaagtggccgggtttaatctgctcatgacgctgcggctgtggtccagc

SEQ ID NO: 112 - protein, 11 aa, Artificial Sequence
  TCR Vbeta CDR-3 sequence
ASSTTLITGYT

SEQ ID NO: 113 - protein, 114 aa, Artificial Sequence
  TCR Valpha sequence
DTGVSQDPRHKITKRGQNVTFRCDPISEHNRLYWYRQTLGQGPEFLTYFQNEAQLEKSRLLSDRFSAERPKGSFSTLEIQRTEQGDSAMYLCASSTTLITGYTFGSGTRLTVVE

SEQ ID NO: 114 - protein, 133 aa, Artificial Sequence
  TCR Valpha sequence
MGTSLLCWMALCLLGADHADTGVSQDPRHKITKRGQNVTFRCDPISEHNRLYWYRQTLGQGPEFLTYFQNEAQLEKSRLLSDRFSAERPKGSFSTLEIQRTEQGDSAMYLCASSTTLITGYTFGSGTRLTVVE

SEQ ID NO: 115 - protein, 311 aa, Artificial Sequence
  TCR beta chain sequence
MGTSLLCWMALCLLGADHADTGVSQDPRHKITKRGQNVTFRCDPISEHNRLYWYRQTLGQGPEFLTYFQNEAQLEKSRLLSDRFSAERPKGSFSTLEIQRTEQGDSAMYLCASSTTLITGYTFGSGTRLTVVEDLNKVFPPEVAVFEPSEAEISHTQKATLVCLATGFYPDHVELSWWVNGKEVHSGVSTDPQPLKEQPALNDSRYCLSSRLRVSATFWQNPRNHFRCQVQFYGLSENDEWTQDRAKPVTQIVSAEAWGRADCGFTSESYQQGVLSATILYEILLGKATLYAVLVSALVLMAMVKRKDSRG

SEQ ID NO: 116 - DNA, 399 bp, Artificial Sequence
  TCR Vbeta sequence
atgggtaccagcctcctctgctggatggccctgtgtctcctgggggcagatcacgcagatactggagtctcccaggaccccagacacaagatcacaaagaggggacagaatgtaactttcaggtgtgatccaatttctgaacacaaccgcctttattggtaccgacagaccctggggcagggcccagagtttctgacttacttccagaatgaagctcaactagaaaaatcaaggctgctcagtgatcggttctctgcagagaggcctaagggatctttctccaccttggagatccagcgcacagagcagggggactcggccatgtatctctgtgccagcagcacgactcttataacgggctacaccttcggttcggggaccaggttaaccgttgtagag

SEQ ID NO: 117 - DNA, 936 bp, Artificial Sequence
  TCR beta chain sequence
atgggtaccagcctcctctgctggatggccctgtgtctcctgggggcagatcacgcagatactggagtctcccaggaccccagacacaagatcacaaagaggggacagaatgtaactttcaggtgtgatccaatttctgaacacaaccgcctttattggtaccgacagaccctggggcagggcccagagtttctgacttacttccagaatgaagctcaactagaaaaatcaaggctgctcagtgatcggttctctgcagagaggcctaagggatctttctccaccttggagatccagcgcacagagcagggggactcggccatgtatctctgtgccagcagcacgactcttataacgggctacaccttcggttcggggaccaggttaaccgttgtagaggacctgaacaaggtgttcccacccgaggtcgctgtgtttgagccatcagaagcagagatctcccacacccaaaaggccacactggtatgcctggccacaggcttctaccccgaccacgtggagctgagctggtgggtgaatgggaaggaggtgcacagtggggtcagcacagacccgcagcccctcaaggagcagcccgccctcaatgactccagatactgcctgagcagccgcctgagggtctcggccaccttctggcagaacccccgcaaccacttccgctgtcaagtccagttctacgggctctcggagaatgacgagtggacccaggatagggccaaacctgtcacccagatcgtcagcgccgaggcctggggtagagcagactgtggcttcacctccgagtcttaccagcaaggggtcctgtctgccaccatcctctatgagatcttgctagggaaggccaccttgtatgccgtgctggtcagtgccctcgtgctgatggccatggtcaagagaaaggattccagaggctag

SEQ ID NO: 118 - DNA, 1821 bp, Artificial Sequence
  TCR sequence
atgtccattcgagctgtatttatattcctgtggctgcagctggacttggtgaatggagagaatgtggagcagcatccttcaaccctgagtgtccaggagggagacagcgctgttatcaagtgtacttattcagacagtgcctcaaactacttcccttggtataagcaagaacttggaaaaagacctcagcttattatagacattcgttcaaatgtgggcgaaaagaaagaccaacgaattgctgttacattgaacaagacagccaaacatttctccctgcacatcacagagacccaacctgaagactcggctgtctacttctgtgcagcacctttggcaggaggaggtgctgacggactcacctttggcaaagggactcatctaatcatccagccctatatccagaaccctgaccctgccgtgtaccagctgagagactctaaatccagtgacaagtctgtctgcctattcaccgattttgattctcaaacaaatgtgtcacaaagtaaggattctgatgtgtatatcacagacaaaactgtgctagacatgaggtctatggacttcaagagcaacagtgctgtggcctggagcaacaaatctgactttgcatgtgcaaacgccttcaacaacagcattattccagaagacaccttcttccccagcccagaaagttcctgtgatgtcaagctggtcgagaaaagctttgaaacagatacgaacctaaactttcaaaacctgtcagtgattgggttccgaatcctcctcctgaaagtggccgggtttaatctgctcatgacgctgcggctgtggtccagcggctccggagccacgaacttctctctgttaaagcaagcaggagacgtggaagaaaaccccggtcccatgggtaccagcctcctctgctggatggccctgtgtctcctgggggcagatcacgcagatactggagtctcccaggaccccagacacaagatcacaaagaggggacagaatgtaactttcaggtgtgatccaatttctgaacacaaccgcctttattggtaccgacagaccctggggcagggcccagagtttctgacttacttccagaatgaagctcaactagaaaaatcaaggctgctcagtgatcggttctctgcagagaggcctaagggatctttctccaccttggagatccagcgcacagagcagggggactcggccatgtatctctgtgccagcagcacgactcttataacgggctacaccttcggttcggggaccaggttaaccgttgtagaggacctgaacaaggtgttcccacccgaggtcgctgtgtttgagccatcagaagcagagatctcccacacccaaaaggccacactggtatgcctggccacaggcttctaccccgaccacgtggagctgagctggtgggtgaatgggaaggaggtgcacagtggggtcagcacagacccgcagcccctcaaggagcagcccgccctcaatgactccagatactgcctgagcagccgcctgagggtctcggccaccttctggcagaacccccgcaaccacttccgctgtcaagtccagttctacgggctctcggagaatgacgagtggacccaggatagggccaaacctgtcacccagatcgtcagcgccgaggcctggggtagagcagactgtggcttcacctccgagtcttaccagcaaggggtcctgtctgccaccatcctctatgagatcttgctagggaaggccaccttgtatgccgtgctggtcagtgccctcgtgctgatggccatggtcaagagaaaggattccagaggctag

SEQ ID NO: 119 - protein, 606 aa, Artificial Sequence
  TCR sequence
MSIRAVFIFLWLQLDLVNGENVEQHPSTLSVQEGDSAVIKCTYSDSASNYFPWYKQELGKRPQLIIDIRSNVGEKKDQRIAVTLNKTAKHFSLHITETQPEDSAVYFCAAPLAGGGADGLTFGKGTHLIIQPYIQNPDPAVYQLRDSKSSDKSVCLFTDFDSQTNVSQSKDSDVYITDKTVLDMRSMDFKSNSAVAWSNKSDFACANAFNNSIIPEDTFFPSPESSCDVKLVEKSFETDTNLNFQNLSVIGFRILLLKVAGFNLLMTLRLWSSGSGATNFSLLKQAGDVEENPGPMGTSLLCWMALCLLGADHADTGVSQDPRHKITKRGQNVTFRCDPISEHNRLYWYRQTLGQGPEFLTYFQNEAQLEKSRLLSDRFSAERPKGSFSTLEIQRTEQGDSAMYLCASSTTLITGYTFGSGTRLTVVEDLNKVFPPEVAVFEPSEAEISHTQKATLVCLATGFYPDHVELSWWVNGKEVHSGVSTDPQPLKEQPALNDSRYCLSSRLRVSATFWQNPRNHFRCQVQFYGLSENDEWTQDRAKPVTQIVSAEAWGRADCGFTSESYQQGVLSATILYEILLGKATLYAVLVSALVLMAMVKRKDSRG

SEQ ID NO: 120 - protein, 13 aa, Artificial Sequence
  TCR Valpha CDR-3 sequence
AVRGTTSGTYKYI

SEQ ID NO: 121 - protein, 115 aa, Artificial Sequence
  TCR Valpha sequence
KQEVTQIPAALSVPEGENLVLNCSFTDSAIYNLQWFRQDPGKGLTSLLLIQSSQREQTSGRLNASLDKSSGRSTLYIAASQPGDSATYLCAVRGTTSGTYKYIFGTGTRLKVLAN

SEQ ID NO: 122 - protein, 134 aa, Artificial Sequence
  TCR Valpha sequence
METLLGLLILWLQLQWVSSKQEVTQIPAALSVPEGENLVLNCSFTDSAIYNLQWFRQDPGKGLTSLLLIQSSQREQTSGRLNASLDKSSGRSTLYIAASQPGDSATYLCAVRGTTSGTYKYIFGTGTRLKVLAN

SEQ ID NO: 123 - protein, 274 aa, Artificial Sequence
  TCR alpha chain sequence
METLLGLLILWLQLQWVSSKQEVTQIPAALSVPEGENLVLNCSFTDSAIYNLQWFRQDPGKGLTSLLLIQSSQREQTSGRLNASLDKSSGRSTLYIAASQPGDSATYLCAVRGTTSGTYKYIFGTGTRLKVLANIQNPDPAVYQLRDSKSSDKSVCLFTDFDSQTNVSQSKDSDVYITDKTVLDMRSMDFKSNSAVAWSNKSDFACANAFNNSIIPEDTFFPSPESSCDVKLVEKSFETDTNLNFQNLSVIGFRILLLKVAGFNLLMTLRLWSS

SEQ ID NO: 124 - DNA, 402 bp, Artificial Sequence
  TCR Valpha sequence
atggagaccctcttgggcctgcttatcctttggctgcagctgcaatgggtgagcagcaaacaggaggtgacgcagattcctgcagctctgagtgtcccagaaggagaaaacttggttctcaactgcagtttcactgatagcgctatttacaacctccagtggtttaggcaggaccctgggaaaggtctcacatctctgttgcttattcagtcaagtcagagagagcaaacaagtggaagacttaatgcctcgctggataaatcatcaggacgtagtactttatacattgcagcttctcagcctggtgactcagccacctacctctgtgctgttcgtgggactacctcaggaacctacaaatacatctttggaacaggcaccaggctgaaggttttagcaaat

SEQ ID NO: 125 - DNA, 822 bp, Artificial Sequence
  TCR alpha chain sequence
atggagaccctcttgggcctgcttatcctttggctgcagctgcaatgggtgagcagcaaacaggaggtgacgcagattcctgcagctctgagtgtcccagaaggagaaaacttggttctcaactgcagtttcactgatagcgctatttacaacctccagtggtttaggcaggaccctgggaaaggtctcacatctctgttgcttattcagtcaagtcagagagagcaaacaagtggaagacttaatgcctcgctggataaatcatcaggacgtagtactttatacattgcagcttctcagcctggtgactcagccacctacctctgtgctgttcgtgggactacctcaggaacctacaaatacatctttggaacaggcaccaggctgaaggttttagcaaatatccagaaccctgaccctgccgtgtaccagctgagagactctaaatccagtgacaagtctgtctgcctattcaccgattttgattctcaaacaaatgtgtcacaaagtaaggattctgatgtgtatatcacagacaaaactgtgctagacatgaggtctatggacttcaagagcaacagtgctgtggcctggagcaacaaatctgactttgcatgtgcaaacgccttcaacaacagcattattccagaagacaccttcttccccagcccagaaagttcctgtgatgtcaagctggtcgagaaaagctttgaaacagatacgaacctaaactttcaaaacctgtcagtgattgggttccgaatcctcctcctgaaagtggccgggtttaatctgctcatgacgctgcggctgtggtccagc

SEQ ID NO: 126 - protein, 11 aa, Artificial Sequence
  TCR Vbeta CDR-3 sequence
ASSFLAGETQY

SEQ ID NO: 127 - protein, 114 aa, Artificial Sequence
  TCR Vbeta sequence
DTGVSQDPRHKITKRGQNVTFRCDPISEHNRLYWYRQTLGQGPEFLTYFQNEAQLEKSRLLSDRFSAERPKGSFSTLEIQRTEQGDSAMYLCASSFLAGETQYFGPGTRLLVLE

SEQ ID NO: 128 - protein, 133 aa, Artificial Sequence
  TCR Vbeta sequence
MGTSLLCWMALCLLGADHADTGVSQDPRHKITKRGQNVTFRCDPISEHNRLYWYRQTLGQGPEFLTYFQNEAQLEKSRLLSDRFSAERPKGSFSTLEIQRTEQGDSAMYLCASSFLAGETQYFGPGTRLLVLE

SEQ ID NO: 129 - protein, 311 aa, Artificial Sequence
  TCR beta chain sequence
MGTSLLCWMALCLLGADHADTGVSQDPRHKITKRGQNVTFRCDPISEHNRLYWYRQTLGQGPEFLTYFQNEAQLEKSRLLSDRFSAERPKGSFSTLEIQRTEQGDSAMYLCASSFLAGETQYFGPGTRLLVLEDLKNVFPPEVAVFEPSEAEISHTQKATLVCLATGFYPDHVELSWWVNGKEVHSGVSTDPQPLKEQPALNDSRYCLSSRLRVSATFWQNPRNHFRCQVQFYGLSENDEWTQDRAKPVTQIVSAEAWGRADCGFTSESYQQGVLSATILYEILLGKATLYAVLVSALVLMAMVKRKDSRG

SEQ ID NO: 130 - DNA, 399 bp, Artificial Sequence
  TCR Vbeta sequence
atgggtaccagcctcctctgctggatggccctgtgtctcctgggggcagatcacgcagatactggagtctcccaggaccccagacacaagatcacaaagaggggacagaatgtaactttcaggtgtgatccaatttctgaacacaaccgcctttattggtaccgacagaccctggggcagggcccagagtttctgacttacttccagaatgaagctcaactagaaaaatcaaggctgctcagtgatcggttctctgcagagaggcctaagggatctttctccaccttggagatccagcgcacagagcagggggactcggccatgtatctctgtgccagcagcttcctagcgggagagacccagtacttcgggccaggcacgcggctcctggtgctcgag

SEQ ID NO: 131 - DNA, 936 bp, Artificial Sequence
  TCR beta chain sequence
atgggtaccagcctcctctgctggatggccctgtgtctcctgggggcagatcacgcagatactggagtctcccaggaccccagacacaagatcacaaagaggggacagaatgtaactttcaggtgtgatccaatttctgaacacaaccgcctttattggtaccgacagaccctggggcagggcccagagtttctgacttacttccagaatgaagctcaactagaaaaatcaaggctgctcagtgatcggttctctgcagagaggcctaagggatctttctccaccttggagatccagcgcacagagcagggggactcggccatgtatctctgtgccagcagcttcctagcgggagagacccagtacttcgggccaggcacgcggctcctggtgctcgaggacctgaaaaacgtgttcccacccgaggtcgctgtgtttgagccatcagaagcagagatctcccacacccaaaaggccacactggtatgcctggccacaggcttctaccccgaccacgtggagctgagctggtgggtgaatgggaaggaggtgcacagtggggtcagcacagacccgcagcccctcaaggagcagcccgccctcaatgactccagatactgcctgagcagccgcctgagggtctcggccaccttctggcagaacccccgcaaccacttccgctgtcaagtccagttctacgggctctcggagaatgacgagtggacccaggatagggccaaacctgtcacccagatcgtcagcgccgaggcctggggtagagcagactgtggcttcacctccgagtcttaccagcaaggggtcctgtctgccaccatcctctatgagatcttgctagggaaggccaccttgtatgccgtgctggtcagtgccctcgtgctgatggccatggtcaagagaaaggattccagaggctag

SEQ ID NO: 132 - DNA, 1824 bp, Artificial Sequence
  TCR sequence
atggagaccctcttgggcctgcttatcctttggctgcagctgcaatgggtgagcagcaaacaggaggtgacgcagattcctgcagctctgagtgtcccagaaggagaaaacttggttctcaactgcagtttcactgatagcgctatttacaacctccagtggtttaggcaggaccctgggaaaggtctcacatctctgttgcttattcagtcaagtcagagagagcaaacaagtggaagacttaatgcctcgctggataaatcatcaggacgtagtactttatacattgcagcttctcagcctggtgactcagccacctacctctgtgctgttcgtgggactacctcaggaacctacaaatacatctttggaacaggcaccaggctgaaggttttagcaaatatccagaaccctgaccctgccgtgtaccagctgagagactctaaatccagtgacaagtctgtctgcctattcaccgattttgattctcaaacaaatgtgtcacaaagtaaggattctgatgtgtatatcacagacaaaactgtgctagacatgaggtctatggacttcaagagcaacagtgctgtggcctggagcaacaaatctgactttgcatgtgcaaacgccttcaacaacagcattattccagaagacaccttcttccccagcccagaaagttcctgtgatgtcaagctggtcgagaaaagctttgaaacagatacgaacctaaactttcaaaacctgtcagtgattgggttccgaatcctcctcctgaaagtggccgggtttaatctgctcatgacgctgcggctgtggtccagcggctccggagccacgaacttctctctgttaaagcaagcaggagacgtggaagaaaaccccggtcccatgggtaccagcctcctctgctggatggccctgtgtctcctgggggcagatcacgcagatactggagtctcccaggaccccagacacaagatcacaaagaggggacagaatgtaactttcaggtgtgatccaatttctgaacacaaccgcctttattggtaccgacagaccctggggcagggcccagagtttctgacttacttccagaatgaagctcaactagaaaaatcaaggctgctcagtgatcggttctctgcagagaggcctaagggatctttctccaccttggagatccagcgcacagagcagggggactcggccatgtatctctgtgccagcagcttcctagcgggagagacccagtacttcgggccaggcacgcggctcctggtgctcgaggacctgaaaaacgtgttcccacccgaggtcgctgtgtttgagccatcagaagcagagatctcccacacccaaaaggccacactggtatgcctggccacaggcttctaccccgaccacgtggagctgagctggtgggtgaatgggaaggaggtgcacagtggggtcagcacagacccgcagcccctcaaggagcagcccgccctcaatgactccagatactgcctgagcagccgcctgagggtctcggccaccttctggcagaacccccgcaaccacttccgctgtcaagtccagttctacgggctctcggagaatgacgagtggacccaggatagggccaaacctgtcacccagatcgtcagcgccgaggcctggggtagagcagactgtggcttcacctccgagtcttaccagcaaggggtcctgtctgccaccatcctctatgagatcttgctagggaaggccaccttgtatgccgtgctggtcagtgccctcgtgctgatggccatggtcaagagaaaggattccagaggctag

SEQ ID NO: 133 - protein, 607 aa, Artificial Sequence
  TCR sequence
METLLGLLILWLQLQWVSSKQEVTQIPAALSVPEGENLVLNCSFTDSAIYNLQWFRQDPGKGLTSLLLIQSSQREQTSGRLNASLDKSSGRSTLYIAASQPGDSATYLCAVRGTTSGTYKYIFGTGTRLKVLANIQNPDPAVYQLRDSKSSDKSVCLFTDFDSQTNVSQSKDSDVYITDKTVLDMRSMDFKSNSAVAWSNKSDFACANAFNNSIIPEDTFFPSPESSCDVKLVEKSFETDTNLNFQNLSVIGFRILLLKVAGFNLLMTLRLWSSGSGATNFSLLKQAGDVEENPGPMGTSLLCWMALCLLGADHADTGVSQDPRHKITKRGQNVTFRCDPISEHNRLYWYRQTLGQGPEFLTYFQNEAQLEKSRLLSDRFSAERPKGSFSTLEIQRTEQGDSAMYLCASSFLAGETQYFGPGTRLLVLEDLKNVFPPEVAVFEPSEAEISHTQKATLVCLATGFYPDHVELSWWVNGKEVHSGVSTDPQPLKEQPALNDSRYCLSSRLRVSATFWQNPRNHFRCQVQFYGLSENDEWTQDRAKPVTQIVSAEAWGRADCGFTSESYQQGVLSATILYEILLGKATLYAVLVSALVLMAMVKRKDSRG

SEQ ID NO: 134 - protein, 6 aa, Artificial Sequence
  TCR Valpha CDR-1 sequence
NSAFQY

SEQ ID NO: 135 - protein, 6 aa, Artificial Sequence
  TCR Valpha CDR-2 sequence
TYSSGN

SEQ ID NO: 136 - protein, 12 aa, Artificial Sequence
  TCR Valpha CDR-3 sequence
AMRATSGTYKYI

SEQ ID NO: 137 - protein, 113 aa, Artificial Sequence
  TCR Valpha sequence
QKEVEQDPGPLSVPEGAIVSLNCTYSNSAFQYFMWYRQYSRKGPELLMYTYSSGNKEDGRFTAQVDKSSKYISLFIRDSQPSDSATYLCAMRATSGTYKYIFGTGTRLKVLAN

SEQ ID NO: 138 - protein, 134 aa, Artificial Sequence
  TCR Valpha sequence
MKSLRVLLVILWLQLSWVWSQQKEVEQDPGPLSVPEGAIVSLNCTYSNSAFQYFMWYRQYSRKGPELLMYTYSSGNKEDGRFTAQVDKSSKYISLFIRDSQPSDSATYLCAMRATSGTYKYIFGTGTRLKVLAN

SEQ ID NO: 139 - protein, 274 aa, Artificial Sequence
  TCR alpha chain sequence
MKSLRVLLVILWLQLSWVWSQQKEVEQDPGPLSVPEGAIVSLNCTYSNSAFQYFMWYRQYSRKGPELLMYTYSSGNKEDGRFTAQVDKSSKYISLFIRDSQPSDSATYLCAMRATSGTYKYIFGTGTRLKVLANIQNPDPAVYQLRDSKSSDKSVCLFTDFDSQTNVSQSKDSDVYITDKTVLDMRSMDFKSNSAVAWSNKSDFACANAFNNSIIPEDTFFPSPESSCDVKLVEKSFETDTNLNFQNLSVIGFRILLLKVAGFNLLMTLRLWSS

SEQ ID NO: 140 - DNA, 402 bp, Artificial Sequence
  TCR Valpha sequence
atgaaatccttgagagttttactggtgatcctgtggcttcagttaagctgggtttggagccaacagaaggaggtggagcaggatcctggaccactcagtgttccagagggagccattgtttctctcaactgcacttacagcaacagtgcttttcaatacttcatgtggtacagacagtattccagaaaaggccctgagttgctgatgtacacatactccagtggtaacaaagaagatggaaggtttacagcacaggtcgataaatccagcaagtatatctccttgttcatcagagactcacagcccagtgattcagccacctacctctgtgcaatgagggctacctcaggaacctacaaatacatctttggaacaggcaccaggctgaaggttttagcaaat

SEQ ID NO: 141 - DNA, 822 bp, Artificial Sequence
  TCR alpha chain sequence
atgaaatccttgagagttttactggtgatcctgtggcttcagttaagctgggtttggagccaacagaaggaggtggagcaggatcctggaccactcagtgttccagagggagccattgtttctctcaactgcacttacagcaacagtgcttttcaatacttcatgtggtacagacagtattccagaaaaggccctgagttgctgatgtacacatactccagtggtaacaaagaagatggaaggtttacagcacaggtcgataaatccagcaagtatatctccttgttcatcagagactcacagcccagtgattcagccacctacctctgtgcaatgagggctacctcaggaacctacaaatacatctttggaacaggcaccaggctgaaggttttagcaaatatccagaaccctgaccctgccgtgtaccagctgagagactctaaatccagtgacaagtctgtctgcctattcaccgattttgattctcaaacaaatgtgtcacaaagtaaggattctgatgtgtatatcacagacaaaactgtgctagacatgaggtctatggacttcaagagcaacagtgctgtggcctggagcaacaaatctgactttgcatgtgcaaacgccttcaacaacagcattattccagaagacaccttcttccccagcccagaaagttcctgtgatgtcaagctggtcgagaaaagctttgaaacagatacgaacctaaactttcaaaacctgtcagtgattgggttccgaatcctcctcctgaaagtggccgggtttaatctgctcatgacgctgcggctgtggtccagc

SEQ ID NO: 142 - protein, 12 aa, Artificial Sequence
  TCR Vbeta CDR-3 sequence
AVPGGSSYNEQF

SEQ ID NO: 143 - protein, 115 aa, Artificial Sequence
  TCR Vbeta sequence
DTGVSQDPRHKITKRGQNVTFRCDPISEHNRLYWYRQTLGQGPEFLTYFQNEAQLEKSRLLSDRFSAERPKGSFSTLEIQRTEQGDSAMYLCAVPGGSSYNEQFFGPGTRLTVLE

SEQ ID NO: 144 - protein, 134 aa, Artificial Sequence
  TCR Vbeta sequence
MGTSLLCWMALCLLGADHADTGVSQDPRHKITKRGQNVTFRCDPISEHNRLYWYRQTLGQGPEFLTYFQNEAQLEKSRLLSDRFSAERPKGSFSTLEIQRTEQGDSAMYLCAVPGGSSYNEQFFGPGTRLTVLE

SEQ ID NO: 145 - protein, 312 aa, Artificial Sequence
  TCR beta chain sequence
MGTSLLCWMALCLLGADHADTGVSQDPRHKITKRGQNVTFRCDPISEHNRLYWYRQTLGQGPEFLTYFQNEAQLEKSRLLSDRFSAERPKGSFSTLEIQRTEQGDSAMYLCAVPGGSSYNEQFFGPGTRLTVLEDLKNVFPPEVAVFEPSEAEISHTQKATLVCLATGFYPDHVELSWWVNGKEVHSGVSTDPQPLKEQPALNDSRYCLSSRLRVSATFWQNPRNHFRCQVQFYGLSENDEWTQDRAKPVTQIVSAEAWGRADCGFTSESYQQGVLSATILYEILLGKATLYAVLVSALVLMAMVKRKDSRG

SEQ ID NO: 146 - DNA, 402 bp, Artificial Sequence
  TCR Vbeta sequence
atgggtaccagcctcctctgctggatggccctgtgtctcctgggggcagatcacgcagatactggagtctcccaggaccccagacacaagatcacaaagaggggacagaatgtaactttcaggtgtgatccaatttctgaacacaaccgcctttattggtaccgacagaccctggggcagggcccagagtttctgacttacttccagaatgaagctcaactagaaaaatcaaggctgctcagtgatcggttctctgcagagaggcctaagggatctttctccaccttggagatccagcgcacagagcagggggactcggccatgtatctctgtgccgtccctggggggagctcctacaatgagcagttcttcgggccagggacacggctcaccgtgctagag

SEQ ID NO: 147 - DNA, 939 bp, Artificial Sequence
  TCR beta chain sequence
atgggtaccagcctcctctgctggatggccctgtgtctcctgggggcagatcacgcagatactggagtctcccaggaccccagacacaagatcacaaagaggggacagaatgtaactttcaggtgtgatccaatttctgaacacaaccgcctttattggtaccgacagaccctggggcagggcccagagtttctgacttacttccagaatgaagctcaactagaaaaatcaaggctgctcagtgatcggttctctgcagagaggcctaagggatctttctccaccttggagatccagcgcacagagcagggggactcggccatgtatctctgtgccgtccctggggggagctcctacaatgagcagttcttcgggccagggacacggctcaccgtgctagaggacctgaaaaacgtgttcccacccgaggtcgctgtgtttgagccatcagaagcagagatctcccacacccaaaaggccacactggtatgcctggccacaggcttctaccccgaccacgtggagctgagctggtgggtgaatgggaaggaggtgcacagtggggtcagcacagacccgcagcccctcaaggagcagcccgccctcaatgactccagatactgcctgagcagccgcctgagggtctcggccaccttctggcagaacccccgcaaccacttccgctgtcaagtccagttctacgggctctcggagaatgacgagtggacccaggatagggccaaacctgtcacccagatcgtcagcgccgaggcctggggtagagcagactgtggcttcacctccgagtcttaccagcaaggggtcctgtctgccaccatcctctatgagatcttgctagggaaggccaccttgtatgccgtgctggtcagtgccctcgtgctgatggccatggtcaagagaaaggattccagaggctag

SEQ ID NO: 148 - DNA, 1827 bp, Artificial Sequence
  TCR sequence
atgaaatccttgagagttttactggtgatcctgtggcttcagttaagctgggtttggagccaacagaaggaggtggagcaggatcctggaccactcagtgttccagagggagccattgtttctctcaactgcacttacagcaacagtgcttttcaatacttcatgtggtacagacagtattccagaaaaggccctgagttgctgatgtacacatactccagtggtaacaaagaagatggaaggtttacagcacaggtcgataaatccagcaagtatatctccttgttcatcagagactcacagcccagtgattcagccacctacctctgtgcaatgagggctacctcaggaacctacaaatacatctttggaacaggcaccaggctgaaggttttagcaaatatccagaaccctgaccctgccgtgtaccagctgagagactctaaatccagtgacaagtctgtctgcctattcaccgattttgattctcaaacaaatgtgtcacaaagtaaggattctgatgtgtatatcacagacaaaactgtgctagacatgaggtctatggacttcaagagcaacagtgctgtggcctggagcaacaaatctgactttgcatgtgcaaacgccttcaacaacagcattattccagaagacaccttcttccccagcccagaaagttcctgtgatgtcaagctggtcgagaaaagctttgaaacagatacgaacctaaactttcaaaacctgtcagtgattgggttccgaatcctcctcctgaaagtggccgggtttaatctgctcatgacgctgcggctgtggtccagcggctccggagccacgaacttctctctgttaaagcaagcaggagacgtggaagaaaaccccggtcccatgggtaccagcctcctctgctggatggccctgtgtctcctgggggcagatcacgcagatactggagtctcccaggaccccagacacaagatcacaaagaggggacagaatgtaactttcaggtgtgatccaatttctgaacacaaccgcctttattggtaccgacagaccctggggcagggcccagagtttctgacttacttccagaatgaagctcaactagaaaaatcaaggctgctcagtgatcggttctctgcagagaggcctaagggatctttctccaccttggagatccagcgcacagagcagggggactcggccatgtatctctgtgccgtccctggggggagctcctacaatgagcagttcttcgggccagggacacggctcaccgtgctagaggacctgaaaaacgtgttcccacccgaggtcgctgtgtttgagccatcagaagcagagatctcccacacccaaaaggccacactggtatgcctggccacaggcttctaccccgaccacgtggagctgagctggtgggtgaatgggaaggaggtgcacagtggggtcagcacagacccgcagcccctcaaggagcagcccgccctcaatgactccagatactgcctgagcagccgcctgagggtctcggccaccttctggcagaacccccgcaaccacttccgctgtcaagtccagttctacgggctctcggagaatgacgagtggacccaggatagggccaaacctgtcacccagatcgtcagcgccgaggcctggggtagagcagactgtggcttcacctccgagtcttaccagcaaggggtcctgtctgccaccatcctctatgagatcttgctagggaaggccaccttgtatgccgtgctggtcagtgccctcgtgctgatggccatggtcaagagaaaggattccagaggctag

SEQ ID NO: 149 - protein, 608 aa, Artificial Sequence
  TCR sequence
MKSLRVLLVILWLQLSWVWSQQKEVEQDPGPLSVPEGAIVSLNCTYSNSAFQYFMWYRQYSRKGPELLMYTYSSGNKEDGRFTAQVDKSSKYISLFIRDSQPSDSATYLCAMRATSGTYKYIFGTGTRLKVLANIQNPDPAVYQLRDSKSSDKSVCLFTDFDSQTNVSQSKDSDVYITDKTVLDMRSMDFKSNSAVAWSNKSDFACANAFNNSIIPEDTFFPSPESSCDVKLVEKSFETDTNLNFQNLSVIGFRILLLKVAGFNLLMTLRLWSSGSGATNFSLLKQAGDVEENPGPMGTSLLCWMALCLLGADHADTGVSQDPRHKITKRGQNVTFRCDPISEHNRLYWYRQTLGQGPEFLTYFQNEAQLEKSRLLSDRFSAERPKGSFSTLEIQRTEQGDSAMYLCAVPGGSSYNEQFFGPGTRLTVLEDLKNVFPPEVAVFEPSEAEISHTQKATLVCLATGFYPDHVELSWWVNGKEVHSGVSTDPQPLKEQPALNDSRYCLSSRLRVSATFWQNPRNHFRCQVQFYGLSENDEWTQDRAKPVTQIVSAEAWGRADCGFTSESYQQGVLSATILYEILLGKATLYAVLVSALVLMAMVKRKDSRG

SEQ ID NO: 150 - protein, 7 aa, Artificial Sequence
  TCR Valpha CDR-1 sequence
TISGTDY

SEQ ID NO: 151 - protein, 5 aa, Artificial Sequence
  TCR Valpha CDR-2 sequence
GLTSN

SEQ ID NO: 152 - protein, 12 aa, Artificial Sequence
  TCR Valpha CDR-3 sequence
ILRAGSGTYKYI

SEQ ID NO: 153 - protein, 112 aa, Artificial Sequence
  TCR Valpha sequence
DAKTTQPNSMESNEEEPVHLPCNHSTISGTDYIHWYRQLPSQGPEYVIHGLTSNVNNRMASLAIAEDRKSSTLILHRATLRDAAVYYCILRAGSGTYKYIFGTGTRLKVLAN

SEQ ID NO: 154 - protein, 129 aa, Artificial Sequence
  TCR Valpha sequence
MKLVTSITVLLSLGIMGDAKTTQPNSMESNEEEPVHLPCNHSTISGTDYIHWYRQLPSQGPEYVIHGLTSNVNNRMASLAIAEDRKSSTLILHRATLRDAAVYYCILRAGSGTYKYIFGTGTRLKVLAN

SEQ ID NO: 155 - protein, 269 aa, Artificial Sequence
  TCR alpha chain sequence
MKLVTSITVLLSLGIMGDAKTTQPNSMESNEEEPVHLPCNHSTISGTDYIHWYRQLPSQGPEYVIHGLTSNVNNRMASLAIAEDRKSSTLILHRATLRDAAVYYCILRAGSGTYKYIFGTGTRLKVLANIQNPDPAVYQLRDSKSSDKSVCLFTDFDSQTNVSQSKDSDVYITDKTVLDMRSMDFKSNSAVAWSNKSDFACANAFNNSIIPEDTFFPSPESSCDVKLVEKSFETDTNLNFQNLSVIGFRILLLKVAGFNLLMTLRLWSS

SEQ ID NO: 156 - DNA, 387 bp, Artificial Sequence
  TCR Valpha sequence
atgaagttggtgacaagcattactgtactcctatctttgggtattatgggtgatgctaagaccacacagccaaattcaatggagagtaacgaagaagagcctgttcacttgccttgtaaccactccacaatcagtggaactgattacatacattggtatcgacagcttccctcccagggtccagagtacgtgattcatggtcttacaagcaatgtgaacaacagaatggcctctctggcaatcgctgaagacagaaagtccagtaccttgatcctgcaccgtgctaccttgagagatgctgctgtgtactactgcatcctgagagcgggctcaggaacctacaaatacatctttggaacaggcaccaggctgaaggttctagcaaat

SEQ ID NO: 157 - DNA, 807 bp, Artificial Sequence
  TCR alpha chain sequence
atgaagttggtgacaagcattactgtactcctatctttgggtattatgggtgatgctaagaccacacagccaaattcaatggagagtaacgaagaagagcctgttcacttgccttgtaaccactccacaatcagtggaactgattacatacattggtatcgacagcttccctcccagggtccagagtacgtgattcatggtcttacaagcaatgtgaacaacagaatggcctctctggcaatcgctgaagacagaaagtccagtaccttgatcctgcaccgtgctaccttgagagatgctgctgtgtactactgcatcctgagagcgggctcaggaacctacaaatacatctttggaacaggcaccaggctgaaggttctagcaaatatccagaaccctgaccctgccgtgtaccagctgagagactctaaatccagtgacaagtctgtctgcctattcaccgattttgattctcaaacaaatgtgtcacaaagtaaggattctgatgtgtatatcacagacaaaactgtgctagacatgaggtctatggacttcaagagcaacagtgctgtggcctggagcaacaaatctgactttgcatgtgcaaacgccttcaacaacagcattattccagaagacaccttcttccccagcccagaaagttcctgtgatgtcaagctggtcgagaaaagctttgaaacagatacgaacctaaactttcaaaacctgtcagtgattgggttccgaatcctcctcctgaaagtggccgggtttaatctgctcatgacgctgcggctgtggtccagc

SEQ ID NO: 158 - protein, 12 aa, Artificial Sequence
  TCR Vbeta CDR-3 sequence
ASSPGTVYNEQF

SEQ ID NO: 159 - protein, 115 aa, Artificial Sequence
  TCR Vbeta sequence
DTGVSQDPRHKITKRGQNVTFRCDPISEHNRLYWYRQTLGQGPEFLTYFQNEAQLEKSRLLSDRFSAERPKGSFSTLEIQRTEQGDSAMYLCASSPGTVYNEQFFGPGTRLTVLE

SEQ ID NO: 160 - protein, 134 aa, Artificial Sequence
  TCR Vbeta sequence
MGTSLLCWMALCLLGADHADTGVSQDPRHKITKRGQNVTFRCDPISEHNRLYWYRQTLGQGPEFLTYFQNEAQLEKSRLLSDRFSAERPKGSFSTLEIQRTEQGDSAMYLCASSPGTVYNEQFFGPGTRLTVLE

SEQ ID NO: 161 - protein, 312 aa, Artificial Sequence
  TCR beta chain sequence
MGTSLLCWMALCLLGADHADTGVSQDPRHKITKRGQNVTFRCDPISEHNRLYWYRQTLGQGPEFLTYFQNEAQLEKSRLLSDRFSAERPKGSFSTLEIQRTEQGDSAMYLCASSPGTVYNEQFFGPGTRLTVLEDLKNVFPPEVAVFEPSEAEISHTQKATLVCLATGFYPDHVELSWWVNGKEVHSGVSTDPQPLKEQPALNDSRYCLSSRLRVSATFWQNPRNHFRCQVQFYGLSENDEWTQDRAKPVTQIVSAEAWGRADCGFTSESYQQGVLSATILYEILLGKATLYAVLVSALVLMAMVKRKDSRG

SEQ ID NO: 162 - DNA, 402 bp, Artificial Sequence
  TCR Vbeta sequence
atgggtaccagcctcctctgctggatggccctgtgtctcctgggggcagatcacgcagatactggagtctcccaggaccccagacacaagatcacaaagaggggacagaatgtaactttcaggtgtgatccaatttctgaacacaaccgcctttattggtaccgacagaccctggggcagggcccagagtttctgacttacttccagaatgaagctcaactagaaaaatcaaggctgctcagtgatcggttctctgcagagaggcctaagggatctttctccaccttggagatccagcgcacagagcagggggactcggccatgtatctctgtgccagcagccccgggacagtttacaatgagcagttcttcgggccagggacacggctcaccgtgctagag

SEQ ID NO: 163 - DNA, 939 bp, Artificial Sequence
  TCR beta chain sequence
atgggtaccagcctcctctgctggatggccctgtgtctcctgggggcagatcacgcagatactggagtctcccaggaccccagacacaagatcacaaagaggggacagaatgtaactttcaggtgtgatccaatttctgaacacaaccgcctttattggtaccgacagaccctggggcagggcccagagtttctgacttacttccagaatgaagctcaactagaaaaatcaaggctgctcagtgatcggttctctgcagagaggcctaagggatctttctccaccttggagatccagcgcacagagcagggggactcggccatgtatctctgtgccagcagccccgggacagtttacaatgagcagttcttcgggccagggacacggctcaccgtgctagaggacctgaaaaacgtgttcccacccgaggtcgctgtgtttgagccatcagaagcagagatctcccacacccaaaaggccacactggtatgcctggccacaggcttctaccccgaccacgtggagctgagctggtgggtgaatgggaaggaggtgcacagtggggtcagcacagacccgcagcccctcaaggagcagcccgccctcaatgactccagatactgcctgagcagccgcctgagggtctcggccaccttctggcagaacccccgcaaccacttccgctgtcaagtccagttctacgggctctcggagaatgacgagtggacccaggatagggccaaacctgtcacccagatcgtcagcgccgaggcctggggtagagcagactgtggcttcacctccgagtcttaccagcaaggggtcctgtctgccaccatcctctatgagatcttgctagggaaggccaccttgtatgccgtgctggtcagtgccctcgtgctgatggccatggtcaagagaaaggattccagaggctag

SEQ ID NO: 164 - DNA, 1812 bp, Artificial Sequence
  TCR sequence
atgaagttggtgacaagcattactgtactcctatctttgggtattatgggtgatgctaagaccacacagccaaattcaatggagagtaacgaagaagagcctgttcacttgccttgtaaccactccacaatcagtggaactgattacatacattggtatcgacagcttccctcccagggtccagagtacgtgattcatggtcttacaagcaatgtgaacaacagaatggcctctctggcaatcgctgaagacagaaagtccagtaccttgatcctgcaccgtgctaccttgagagatgctgctgtgtactactgcatcctgagagcgggctcaggaacctacaaatacatctttggaacaggcaccaggctgaaggttctagcaaatatccagaaccctgaccctgccgtgtaccagctgagagactctaaatccagtgacaagtctgtctgcctattcaccgattttgattctcaaacaaatgtgtcacaaagtaaggattctgatgtgtatatcacagacaaaactgtgctagacatgaggtctatggacttcaagagcaacagtgctgtggcctggagcaacaaatctgactttgcatgtgcaaacgccttcaacaacagcattattccagaagacaccttcttccccagcccagaaagttcctgtgatgtcaagctggtcgagaaaagctttgaaacagatacgaacctaaactttcaaaacctgtcagtgattgggttccgaatcctcctcctgaaagtggccgggtttaatctgctcatgacgctgcggctgtggtccagcggctccggagccacgaacttctctctgttaaagcaagcaggagacgtggaagaaaaccccggtcccatgggtaccagcctcctctgctggatggccctgtgtctcctgggggcagatcacgcagatactggagtctcccaggaccccagacacaagatcacaaagaggggacagaatgtaactttcaggtgtgatccaatttctgaacacaaccgcctttattggtaccgacagaccctggggcagggcccagagtttctgacttacttccagaatgaagctcaactagaaaaatcaaggctgctcagtgatcggttctctgcagagaggcctaagggatctttctccaccttggagatccagcgcacagagcagggggactcggccatgtatctctgtgccagcagccccgggacagtttacaatgagcagttcttcgggccagggacacggctcaccgtgctagaggacctgaaaaacgtgttcccacccgaggtcgctgtgtttgagccatcagaagcagagatctcccacacccaaaaggccacactggtatgcctggccacaggcttctaccccgaccacgtggagctgagctggtgggtgaatgggaaggaggtgcacagtggggtcagcacagacccgcagcccctcaaggagcagcccgccctcaatgactccagatactgcctgagcagccgcctgagggtctcggccaccttctggcagaacccccgcaaccacttccgctgtcaagtccagttctacgggctctcggagaatgacgagtggacccaggatagggccaaacctgtcacccagatcgtcagcgccgaggcctggggtagagcagactgtggcttcacctccgagtcttaccagcaaggggtcctgtctgccaccatcctctatgagatcttgctagggaaggccaccttgtatgccgtgctggtcagtgccctcgtgctgatggccatggtcaagagaaaggattccagaggctag

SEQ ID NO: 165 - protein, 603 aa, Artificial Sequence
  TCR sequence
MKLVTSITVLLSLGIMGDAKTTQPNSMESNEEEPVHLPCNHSTISGTDYIHWYRQLPSQGPEYVIHGLTSNVNNRMASLAIAEDRKSSTLILHRATLRDAAVYYCILRAGSGTYKYIFGTGTRLKVLANIQNPDPAVYQLRDSKSSDKSVCLFTDFDSQTNVSQSKDSDVYITDKTVLDMRSMDFKSNSAVAWSNKSDFACANAFNNSIIPEDTFFPSPESSCDVKLVEKSFETDTNLNFQNLSVIGFRILLLKVAGFNLLMTLRLWSSGSGATNFSLLKQAGDVEENPGPMGTSLLCWMALCLLGADHADTGVSQDPRHKITKRGQNVTFRCDPISEHNRLYWYRQTLGQGPEFLTYFQNEAQLEKSRLLSDRFSAERPKGSFSTLEIQRTEQGDSAMYLCASSPGTVYNEQFFGPGTRLTVLEDLKNVFPPEVAVFEPSEAEISHTQKATLVCLATGFYPDHVELSWWVNGKEVHSGVSTDPQPLKEQPALNDSRYCLSSRLRVSATFWQNPRNHFRCQVQFYGLSENDEWTQDRAKPVTQIVSAEAWGRADCGFTSESYQQGVLSATILYEILLGKATLYAVLVSALVLMAMVKRKDSRG

SEQ ID NO: 166 - protein, 11 aa, Artificial Sequence
  TCR Valpha CDR-3 sequence
AVTRTGANNLF

SEQ ID NO: 167 - protein, 113 aa, Artificial Sequence
  TCR Valpha sequence
KQEVTQIPAALSVPEGENLVLNCSFTDSAIYNLQWFRQDPGKGLTSLLLIQSSQREQTSGRLNASLDKSSGRSTLYIAASQPGDSATYLCAVTRTGANNLFFGTGTRLTVIPY

SEQ ID NO: 168 - protein, 132 aa, Artificial Sequence
  TCR Valpha sequence
METLLGLLILWLQLQWVSSKQEVTQIPAALSVPEGENLVLNCSFTDSAIYNLQWFRQDPGKGLTSLLLIQSSQREQTSGRLNASLDKSSGRSTLYIAASQPGDSATYLCAVTRTGANNLFFGTGTRLTVIPY

SEQ ID NO: 169 - protein, 272 aa, Artificial Sequence
  TCR alpha chain sequence
METLLGLLILWLQLQWVSSKQEVTQIPAALSVPEGENLVLNCSFTDSAIYNLQWFRQDPGKGLTSLLLIQSSQREQTSGRLNASLDKSSGRSTLYIAASQPGDSATYLCAVTRTGANNLFFGTGTRLTVIPYIQNPDPAVYQLRDSKSSDKSVCLFTDFDSQTNVSQSKDSDVYITDKTVLDMRSMDFKSNSAVAWSNKSDFACANAFNNSIIPEDTFFPSPESSCDVKLVEKSFETDTNLNFQNLSVIGFRILLLKVAGFNLLMTLRLWSS

SEQ ID NO: 170 - DNA, 396 bp, Artificial Sequence
  TCR Valpha sequence
atggagaccctcttgggcctgcttatcctttggctgcagctgcaatgggtgagcagcaaacaggaggtgacgcagattcctgcagctctgagtgtcccagaaggagaaaacttggttctcaactgcagtttcactgatagcgctatttacaacctccagtggtttaggcaggaccctgggaaaggtctcacatctctgttgcttattcagtcaagtcagagagagcaaacaagtggaagacttaatgcctcgctggataaatcatcaggacgtagtactttatacattgcagcttctcagcctggtgactcagccacctacctctgtgctgtgacgaggactggggcaaacaacctcttctttgggactggaacgagactcaccgttattccctat

SEQ ID NO: 171 - DNA, 816 bp, Artificial Sequence
  TCR alpha chain sequence
atggagaccctcttgggcctgcttatcctttggctgcagctgcaatgggtgagcagcaaacaggaggtgacgcagattcctgcagctctgagtgtcccagaaggagaaaacttggttctcaactgcagtttcactgatagcgctatttacaacctccagtggtttaggcaggaccctgggaaaggtctcacatctctgttgcttattcagtcaagtcagagagagcaaacaagtggaagacttaatgcctcgctggataaatcatcaggacgtagtactttatacattgcagcttctcagcctggtgactcagccacctacctctgtgctgtgacgaggactggggcaaacaacctcttctttgggactggaacgagactcaccgttattccctatatccagaaccctgaccctgccgtgtaccagctgagagactctaaatccagtgacaagtctgtctgcctattcaccgattttgattctcaaacaaatgtgtcacaaagtaaggattctgatgtgtatatcacagacaaaactgtgctagacatgaggtctatggacttcaagagcaacagtgctgtggcctggagcaacaaatctgactttgcatgtgcaaacgccttcaacaacagcattattccagaagacaccttcttccccagcccagaaagttcctgtgatgtcaagctggtcgagaaaagctttgaaacagatacgaacctaaactttcaaaacctgtcagtgattgggttccgaatcctcctcctgaaagtggccgggtttaatctgctcatgacgctgcggctgtggtccagc

SEQ ID NO: 172 - protein, 12 aa, Artificial Sequence
  TCR Vbeta CDR-3 sequence
ASSLGVLGIGYT

SEQ ID NO: 173 - protein, 115 aa, Artificial Sequence
  TCR Vbeta sequence
DTGVSQDPRHKITKRGQNVTFRCDPISEHNRLYWYRQTLGQGPEFLTYFQNEAQLEKSRLLSDRFSAERPKGSFSTLEIQRTEQGDSAMYLCASSLGVLGIGYTFGSGTRLTVVE

SEQ ID NO: 174 - protein, 134 aa, Artificial Sequence
  TCR Vbeta sequence
MGTSLLCWMALCLLGADHADTGVSQDPRHKITKRGQNVTFRCDPISEHNRLYWYRQTLGQGPEFLTYFQNEAQLEKSRLLSDRFSAERPKGSFSTLEIQRTEQGDSAMYLCASSLGVLGIGYTFGSGTRLTVVE

SEQ ID NO: 175 - protein, 310 aa, Artificial Sequence
  TCR beta chain sequence
MGTSLLCWMALCLLGADHADTGVSQDPRHKITKRGQNVTFRCDPISEHNRLYWYRQTLGQGPEFLTYFQNEAQLEKSRLLSDRFSAERPKGSFSTLEIQRTEQGDSAMYLCASSLGVLGIGYTFGSGTRLTVVEDLNKVFPPEVAVFEPSEAEISHTQKATLVCLATGFFPDHVELSWWVNGKEVHSGVSTDPQPLKEQPALNDSRYCLSSRLRVSATFWQNPRNHFRCQVQFYGLSENDEWTQDRAKPVTQIVSAEAWGRADCGFTSVSYQQGVLSATILYEILLGKATLYAVLVSALVLMAMVKRKDF

SEQ ID NO: 176 - DNA, 402 bp, Artificial Sequence
  TCR Vbeta sequence
atgggtaccagcctcctctgctggatggccctgtgtctcctgggggcagatcacgcagatactggagtctcccaggaccccagacacaagatcacaaagaggggacagaatgtaactttcaggtgtgatccaatttctgaacacaaccgcctttattggtaccgacagaccctggggcagggcccagagtttctgacttacttccagaatgaagctcaactagaaaaatcaaggctgctcagtgatcggttctctgcagagaggcctaagggatctttctccaccttggagatccagcgcacagagcagggggactcggccatgtatctctgtgccagcagcttaggagtactcgggatcggctacaccttcggttcggggaccaggttaaccgttgtagag

SEQ ID NO: 177 - DNA, 933 bp, Artificial Sequence
  TCR beta chain sequence
atgggtaccagcctcctctgctggatggccctgtgtctcctgggggcagatcacgcagatactggagtctcccaggaccccagacacaagatcacaaagaggggacagaatgtaactttcaggtgtgatccaatttctgaacacaaccgcctttattggtaccgacagaccctggggcagggcccagagtttctgacttacttccagaatgaagctcaactagaaaaatcaaggctgctcagtgatcggttctctgcagagaggcctaagggatctttctccaccttggagatccagcgcacagagcagggggactcggccatgtatctctgtgccagcagcttaggagtactcgggatcggctacaccttcggttcggggaccaggttaaccgttgtagaggacctgaacaaggtgttcccacccgaggtcgctgtgtttgagccatcagaagcagagatctcccacacccaaaaggccacactggtgtgcctggccacaggcttcttccccgaccacgtggagctgagctggtgggtgaatgggaaggaggtgcacagtggggtcagcacagacccgcagcccctcaaggagcagcccgccctcaatgactccagatactgcctgagcagccgcctgagggtctcggccaccttctggcagaacccccgcaaccacttccgctgtcaagtccagttctacgggctctcggagaatgacgagtggacccaggatagggccaaacccgtcacccagatcgtcagcgccgaggcctggggtagagcagactgtggctttacctcggtgtcctaccagcaaggggtcctgtctgccaccatcctctatgagatcctgctagggaaggccaccctgtatgctgtgctggtcagcgcccttgtgttgatggccatggtcaagagaaaggatttctga

SEQ ID NO: 178 - DNA, 1815 bp, Artificial Sequence
  TCR sequence
atggagaccctcttgggcctgcttatcctttggctgcagctgcaatgggtgagcagcaaacaggaggtgacgcagattcctgcagctctgagtgtcccagaaggagaaaacttggttctcaactgcagtttcactgatagcgctatttacaacctccagtggtttaggcaggaccctgggaaaggtctcacatctctgttgcttattcagtcaagtcagagagagcaaacaagtggaagacttaatgcctcgctggataaatcatcaggacgtagtactttatacattgcagcttctcagcctggtgactcagccacctacctctgtgctgtgacgaggactggggcaaacaacctcttctttgggactggaacgagactcaccgttattccctatatccagaaccctgaccctgccgtgtaccagctgagagactctaaatccagtgacaagtctgtctgcctattcaccgattttgattctcaaacaaatgtgtcacaaagtaaggattctgatgtgtatatcacagacaaaactgtgctagacatgaggtctatggacttcaagagcaacagtgctgtggcctggagcaacaaatctgactttgcatgtgcaaacgccttcaacaacagcattattccagaagacaccttcttccccagcccagaaagttcctgtgatgtcaagctggtcgagaaaagctttgaaacagatacgaacctaaactttcaaaacctgtcagtgattgggttccgaatcctcctcctgaaagtggccgggtttaatctgctcatgacgctgcggctgtggtccagcggctccggagccacgaacttctctctgttaaagcaagcaggagacgtggaagaaaaccccggtcccatgggtaccagcctcctctgctggatggccctgtgtctcctgggggcagatcacgcagatactggagtctcccaggaccccagacacaagatcacaaagaggggacagaatgtaactttcaggtgtgatccaatttctgaacacaaccgcctttattggtaccgacagaccctggggcagggcccagagtttctgacttacttccagaatgaagctcaactagaaaaatcaaggctgctcagtgatcggttctctgcagagaggcctaagggatctttctccaccttggagatccagcgcacagagcagggggactcggccatgtatctctgtgccagcagcttaggagtactcgggatcggctacaccttcggttcggggaccaggttaaccgttgtagaggacctgaacaaggtgttcccacccgaggtcgctgtgtttgagccatcagaagcagagatctcccacacccaaaaggccacactggtgtgcctggccacaggcttcttccccgaccacgtggagctgagctggtgggtgaatgggaaggaggtgcacagtggggtcagcacagacccgcagcccctcaaggagcagcccgccctcaatgactccagatactgcctgagcagccgcctgagggtctcggccaccttctggcagaacccccgcaaccacttccgctgtcaagtccagttctacgggctctcggagaatgacgagtggacccaggatagggccaaacccgtcacccagatcgtcagcgccgaggcctggggtagagcagactgtggctttacctcggtgtcctaccagcaaggggtcctgtctgccaccatcctctatgagatcctgctagggaaggccaccctgtatgctgtgctggtcagcgcccttgtgttgatggccatggtcaagagaaaggatttctga

SEQ ID NO: 179 - protein, 604 aa, Artificial Sequence
  TCR sequence
METLLGLLILWLQLQWVSSKQEVTQIPAALSVPEGENLVLNCSFTDSAIYNLQWFRQDPGKGLTSLLLIQSSQREQTSGRLNASLDKSSGRSTLYIAASQPGDSATYLCAVTRTGANNLFFGTGTRLTVIPYIQNPDPAVYQLRDSKSSDKSVCLFTDFDSQTNVSQSKDSDVYITDKTVLDMRSMDFKSNSAVAWSNKSDFACANAFNNSIIPEDTFFPSPESSCDVKLVEKSFETDTNLNFQNLSVIGFRILLLKVAGFNLLMTLRLWSSGSGATNFSLLKQAGDVEENPGPMGTSLLCWMALCLLGADHADTGVSQDPRHKITKRGQNVTFRCDPISEHNRLYWYRQTLGQGPEFLTYFQNEAQLEKSRLLSDRFSAERPKGSFSTLEIQRTEQGDSAMYLCASSLGVLGIGYTFGSGTRLTVVEDLNKVFPPEVAVFEPSEAEISHTQKATLVCLATGFFPDHVELSWWVNGKEVHSGVSTDPQPLKEQPALNDSRYCLSSRLRVSATFWQNPRNHFRCQVQFYGLSENDEWTQDRAKPVTQIVSAEAWGRADCGFTSVSYQQGVLSATILYEILLGKATLYAVLVSALVLMAMVKRKDF

SEQ ID NO: 180 - protein, 13 aa, Artificial Sequence
  TCR Valpha CDR-3 sequence
AVRGSTSGTYKYI

SEQ ID NO: 181 - protein, 115 aa, Artificial Sequence
  TCR Valpha sequence
KQEVTQIPAALSVPEGENLVLNCSFTDSAIYNLQWFRQDPGKGLTSLLLIQSSQREQTSGRLNASLDKSSGRSTLYIAASQPGDSATYLCAVRGSTSGTYKYIFGTGTRLKVLAN

SEQ ID NO: 182 - protein, 134 aa, Artificial Sequence
  TCR Valpha sequence
METLLGLLILWLQLQWVSSKQEVTQIPAALSVPEGENLVLNCSFTDSAIYNLQWFRQDPGKGLTSLLLIQSSQREQTSGRLNASLDKSSGRSTLYIAASQPGDSATYLCAVRGSTSGTYKYIFGTGTRLKVLAN

SEQ ID NO: 183 - protein, 274 aa, Artificial Sequence
  TCR alpha chain sequence
METLLGLLILWLQLQWVSSKQEVTQIPAALSVPEGENLVLNCSFTDSAIYNLQWFRQDPGKGLTSLLLIQSSQREQTSGRLNASLDKSSGRSTLYIAASQPGDSATYLCAVRGSTSGTYKYIFGTGTRLKVLANIQNPDPAVYQLRDSKSSDKSVCLFTDFDSQTNVSQSKDSDVYITDKTVLDMRSMDFKSNSAVAWSNKSDFACANAFNNSIIPEDTFFPSPESSCDVKLVEKSFETDTNLNFQNLSVIGFRILLLKVAGFNLLMTLRLWSS

SEQ ID NO: 184 - DNA, 402 bp, Artificial Sequence
  TCR Valpha sequence
atggagaccctcttgggcctgcttatcctttggctgcagctgcaatgggtgagcagcaaacaggaggtgacgcagattcctgcagctctgagtgtcccagaaggagaaaacttggttctcaactgcagtttcactgatagcgctatttacaacctccagtggtttaggcaggaccctgggaaaggtctcacatctctgttgcttattcagtcaagtcagagagagcaaacaagtggaagacttaatgcctcgctggataaatcatcaggacgtagtactttatacattgcagcttctcagcctggtgactcagccacctacctctgtgctgtgagggggagtacctcaggaacctacaaatacatctttggaacaggcaccaggctgaaggttttagcaaat

SEQ ID NO: 185 - DNA, 822 bp, Artificial Sequence
  TCR alpha chain sequence
atggagaccctcttgggcctgcttatcctttggctgcagctgcaatgggtgagcagcaaacaggaggtgacgcagattcctgcagctctgagtgtcccagaaggagaaaacttggttctcaactgcagtttcactgatagcgctatttacaacctccagtggtttaggcaggaccctgggaaaggtctcacatctctgttgcttattcagtcaagtcagagagagcaaacaagtggaagacttaatgcctcgctggataaatcatcaggacgtagtactttatacattgcagcttctcagcctggtgactcagccacctacctctgtgctgtgagggggagtacctcaggaacctacaaatacatctttggaacaggcaccaggctgaaggttttagcaaatatccagaaccctgaccctgccgtgtaccagctgagagactctaaatccagtgacaagtctgtctgcctattcaccgattttgattctcaaacaaatgtgtcacaaagtaaggattctgatgtgtatatcacagacaaaactgtgctagacatgaggtctatggacttcaagagcaacagtgctgtggcctggagcaacaaatctgactttgcatgtgcaaacgccttcaacaacagcattattccagaagacaccttcttccccagcccagaaagttcctgtgatgtcaagctggtcgagaaaagctttgaaacagatacgaacctaaactttcaaaacctgtcagtgattgggttccgaatcctcctcctgaaagtggccgggtttaatctgctcatgacgctgcggctgtggtccagc

SEQ ID NO: 186 - protein, 11 aa, Artificial Sequence
  TCR Vbeta CDR-3 sequence
ASSLVAGETQY

SEQ ID NO: 187 - protein, 114 aa, Artificial Sequence
  TCR Vbeta sequence
DTGVSQDPRHKITKRGQNVTFRCDPISEHNRLYWYRQTLGQGPEFLTYFQNEAQLEKSRLLSDRFSAERPKGSFSTLEIQRTEQGDSAMYLCASSLVAGETQYFGPGTRLLVLE

SEQ ID NO: 188 - protein, 133 aa, Artificial Sequence
  TCR Vbeta sequence
MGTSLLCWMALCLLGADHADTGVSQDPRHKITKRGQNVTFRCDPISEHNRLYWYRQTLGQGPEFLTYFQNEAQLEKSRLLSDRFSAERPKGSFSTLEIQRTEQGDSAMYLCASSLVAGETQYFGPGTRLLVLE

SEQ ID NO: 189 - protein, 311 aa, Artificial Sequence
  TCR beta chain sequence
MGTSLLCWMALCLLGADHADTGVSQDPRHKITKRGQNVTFRCDPISEHNRLYWYRQTLGQGPEFLTYFQNEAQLEKSRLLSDRFSAERPKGSFSTLEIQRTEQGDSAMYLCASSLVAGETQYFGPGTRLLVLEDLKNVFPPEVAVFEPSEAEISHTQKATLVCLATGFYPDHVELSWWVNGKEVHSGVSTDPQPLKEQPALNDSRYCLSSRLRVSATFWQNPRNHFRCQVQFYGLSENDEWTQDRAKPVTQIVSAEAWGRADCGFTSESYQQGVLSATILYEILLGKATLYAVLVSALVLMAMVKRKDSRG

SEQ ID NO: 190 - DNA, 399 bp, Artificial Sequence
  TCR Vbeta sequence
atgggtaccagcctcctctgctggatggccctgtgtctcctgggggcagatcacgcagatactggagtctcccaggaccccagacacaagatcacaaagaggggacagaatgtaactttcaggtgtgatccaatttctgaacacaaccgcctttattggtaccgacagaccctggggcagggcccagagtttctgacttacttccagaatgaagctcaactagaaaaatcaaggctgctcagtgatcggttctctgcagagaggcctaagggatctttctccaccttggagatccagcgcacagagcagggggactcggccatgtatctctgtgccagcagcttagtcgccggagagacccagtacttcgggccaggcacgcggctcctggtgctcgag

SEQ ID NO: 191 - DNA, 936 bp, Artificial Sequence
  TCR beta chain sequence
atgggtaccagcctcctctgctggatggccctgtgtctcctgggggcagatcacgcagatactggagtctcccaggaccccagacacaagatcacaaagaggggacagaatgtaactttcaggtgtgatccaatttctgaacacaaccgcctttattggtaccgacagaccctggggcagggcccagagtttctgacttacttccagaatgaagctcaactagaaaaatcaaggctgctcagtgatcggttctctgcagagaggcctaagggatctttctccaccttggagatccagcgcacagagcagggggactcggccatgtatctctgtgccagcagcttagtcgccggagagacccagtacttcgggccaggcacgcggctcctggtgctcgaggacctgaaaaacgtgttcccacccgaggtcgctgtgtttgagccatcagaagcagagatctcccacacccaaaaggccacactggtatgcctggccacaggcttctaccccgaccacgtggagctgagctggtgggtgaatgggaaggaggtgcacagtggggtcagcacagacccgcagcccctcaaggagcagcccgccctcaatgactccagatactgcctgagcagccgcctgagggtctcggccaccttctggcagaacccccgcaaccacttccgctgtcaagtccagttctacgggctctcggagaatgacgagtggacccaggatagggccaaacctgtcacccagatcgtcagcgccgaggcctggggtagagcagactgtggcttcacctccgagtcttaccagcaaggggtcctgtctgccaccatcctctatgagatcttgctagggaaggccaccttgtatgccgtgctggtcagtgccctcgtgctgatggccatggtcaagagaaaggattccagaggctag

SEQ ID NO: 192 - DNA, 1824 bp, Artificial Sequence
  TCR sequence
atggagaccctcttgggcctgcttatcctttggctgcagctgcaatgggtgagcagcaaacaggaggtgacgcagattcctgcagctctgagtgtcccagaaggagaaaacttggttctcaactgcagtttcactgatagcgctatttacaacctccagtggtttaggcaggaccctgggaaaggtctcacatctctgttgcttattcagtcaagtcagagagagcaaacaagtggaagacttaatgcctcgctggataaatcatcaggacgtagtactttatacattgcagcttctcagcctggtgactcagccacctacctctgtgctgtgagggggagtacctcaggaacctacaaatacatctttggaacaggcaccaggctgaaggttttagcaaatatccagaaccctgaccctgccgtgtaccagctgagagactctaaatccagtgacaagtctgtctgcctattcaccgattttgattctcaaacaaatgtgtcacaaagtaaggattctgatgtgtatatcacagacaaaactgtgctagacatgaggtctatggacttcaagagcaacagtgctgtggcctggagcaacaaatctgactttgcatgtgcaaacgccttcaacaacagcattattccagaagacaccttcttccccagcccagaaagttcctgtgatgtcaagctggtcgagaaaagctttgaaacagatacgaacctaaactttcaaaacctgtcagtgattgggttccgaatcctcctcctgaaagtggccgggtttaatctgctcatgacgctgcggctgtggtccagcggctccggagccacgaacttctctctgttaaagcaagcaggagacgtggaagaaaaccccggtcccatgggtaccagcctcctctgctggatggccctgtgtctcctgggggcagatcacgcagatactggagtctcccaggaccccagacacaagatcacaaagaggggacagaatgtaactttcaggtgtgatccaatttctgaacacaaccgcctttattggtaccgacagaccctggggcagggcccagagtttctgacttacttccagaatgaagctcaactagaaaaatcaaggctgctcagtgatcggttctctgcagagaggcctaagggatctttctccaccttggagatccagcgcacagagcagggggactcggccatgtatctctgtgccagcagcttagtcgccggagagacccagtacttcgggccaggcacgcggctcctggtgctcgaggacctgaaaaacgtgttcccacccgaggtcgctgtgtttgagccatcagaagcagagatctcccacacccaaaaggccacactggtatgcctggccacaggcttctaccccgaccacgtggagctgagctggtgggtgaatgggaaggaggtgcacagtggggtcagcacagacccgcagcccctcaaggagcagcccgccctcaatgactccagatactgcctgagcagccgcctgagggtctcggccaccttctggcagaacccccgcaaccacttccgctgtcaagtccagttctacgggctctcggagaatgacgagtggacccaggatagggccaaacctgtcacccagatcgtcagcgccgaggcctggggtagagcagactgtggcttcacctccgagtcttaccagcaaggggtcctgtctgccaccatcctctatgagatcttgctagggaaggccaccttgtatgccgtgctggtcagtgccctcgtgctgatggccatggtcaagagaaaggattccagaggctag

SEQ ID NO: 193 - protein, 607 aa, Artificial Sequence
  TCR sequence
METLLGLLILWLQLQWVSSKQEVTQIPAALSVPEGENLVLNCSFTDSAIYNLQWFRQDPGKGLTSLLLIQSSQREQTSGRLNASLDKSSGRSTLYIAASQPGDSATYLCAVRGSTSGTYKYIFGTGTRLKVLANIQNPDPAVYQLRDSKSSDKSVCLFTDFDSQTNVSQSKDSDVYITDKTVLDMRSMDFKSNSAVAWSNKSDFACANAFNNSIIPEDTFFPSPESSCDVKLVEKSFETDTNLNFQNLSVIGFRILLLKVAGFNLLMTLRLWSSGSGATNFSLLKQAGDVEENPGPMGTSLLCWMALCLLGADHADTGVSQDPRHKITKRGQNVTFRCDPISEHNRLYWYRQTLGQGPEFLTYFQNEAQLEKSRLLSDRFSAERPKGSFSTLEIQRTEQGDSAMYLCASSLVAGETQYFGPGTRLLVLEDLKNVFPPEVAVFEPSEAEISHTQKATLVCLATGFYPDHVELSWWVNGKEVHSGVSTDPQPLKEQPALNDSRYCLSSRLRVSATFWQNPRNHFRCQVQFYGLSENDEWTQDRAKPVTQIVSAEAWGRADCGFTSESYQQGVLSATILYEILLGKATLYAVLVSALVLMAMVKRKDSRG

SEQ ID NO: 194 - protein, 9 aa, Artificial Sequence
  TCR Valpha CDR-3 sequence
AAIVGNQFY

SEQ ID NO: 195 - protein, 111 aa, Artificial Sequence
  TCR Valpha sequence
GENVEQHPSTLSVQEGDSAVIKCTYSDSASNYFPWYKQELGKRPQLIIDIRSNVGEKKDQRIAVTLNKTAKHFSLHITETQPEDSAVYFCAAIVGNQFYFGTGTSLTVIPN

SEQ ID NO: 196 - protein, 129 aa, Artificial Sequence
  TCR Valpha sequence
MSIRALFIFLWLQLDLVNGENVEQHPSTLSVQEGDSAVIKCTYSDSASNYFPWYKQELGKRPQLIIDIRSNVGEKKDQRIAVTLNKTAKHFSLHITETQPEDSAVYFCAAIVGNQFYFGTGTSLTVIPN

SEQ ID NO: 197 - protein, 269 aa, Artificial Sequence
  TCR alpha chain sequence
MSIRALFIFLWLQLDLVNGENVEQHPSTLSVQEGDSAVIKCTYSDSASNYFPWYKQELGKRPQLIIDIRSNVGEKKDQRIAVTLNKTAKHFSLHITETQPEDSAVYFCAAIVGNQFYFGTGTSLTVIPNIQKPDPAVYQLRDSKSSDKSVCLFTDFDSQTNVSQSKDSDVYITDKTVLDMRSMDFKSNSAVAWSNKSDFACANAFNNSIIPEDTFFPSPESSCDVKLVEKSFETDTNLNFQNLSVIGFRILLLKVAGFNLLMTLRLWSS

SEQ ID NO: 198 - DNA, 387 bp, Artificial Sequence
  TCR Valpha sequence
atgtccattcgagctttatttatattcctgtggctgcagctggacttggtgaatggagagaatgtggagcagcatccttcaaccctgagtgtccaggagggagacagcgctgttatcaagtgtacttattcagacagtgcctcaaactacttcccttggtataagcaagaacttggaaaaagacctcagcttattatagacattcgttcaaatgtgggcgaaaagaaagaccaacgaattgctgttacattgaacaagacagccaaacatttctccctgcacatcacagagacccaacctgaagactcggctgtctacttctgtgcagcaatagtcggtaaccagttctattttgggacagggacaagtttgacggtcattccaaat

SEQ ID NO: 199 - DNA, 807 bp, Artificial Sequence
  TCR alpha chain sequence
atgtccattcgagctttatttatattcctgtggctgcagctggacttggtgaatggagagaatgtggagcagcatccttcaaccctgagtgtccaggagggagacagcgctgttatcaagtgtacttattcagacagtgcctcaaactacttcccttggtataagcaagaacttggaaaaagacctcagcttattatagacattcgttcaaatgtgggcgaaaagaaagaccaacgaattgctgttacattgaacaagacagccaaacatttctccctgcacatcacagagacccaacctgaagactcggctgtctacttctgtgcagcaatagtcggtaaccagttctattttgggacagggacaagtttgacggtcattccaaatatccagaagcctgaccctgccgtgtaccagctgagagactctaaatccagtgacaagtctgtctgcctattcaccgattttgattctcaaacaaatgtgtcacaaagtaaggattctgatgtgtatatcacagacaaaactgtgctagacatgaggtctatggacttcaagagcaacagtgctgtggcctggagcaacaaatctgactttgcatgtgcaaacgccttcaacaacagcattattccagaagacaccttcttccccagcccagaaagttcctgtgatgtcaagctggtcgagaaaagctttgaaacagatacgaacctaaactttcaaaacctgtcagtgattgggttccgaatcctcctcctgaaagtggccgggtttaatctgctcatgacgctgcggctgtggtccagc

SEQ ID NO: 200 - protein, 11 aa, Artificial Sequence
  TCR Vbeta CDR-3 sequence
ASSETTLSEQF

SEQ ID NO: 201 - protein, 114 aa, Artificial Sequence
  TCR Vbeta sequence
DTGVSQDPRHKITKRGQNVTFRCDPISEHNRLYWYRQTLGQGPEFLTYFQNEAQLEKSRLLSDRFSAERPKGSFSTLEIQRTEQGDSAMYLCASSETTLSEQFFGPGTRLTVLE

SEQ ID NO: 202 - protein, 133 aa, Artificial Sequence
  TCR Vbeta sequence
MGTSLLCWMALCLLGADHADTGVSQDPRHKITKRGQNVTFRCDPISEHNRLYWYRQTLGQGPEFLTYFQNEAQLEKSRLLSDRFSAERPKGSFSTLEIQRTEQGDSAMYLCASSETTLSEQFFGPGTRLTVLE

SEQ ID NO: 203 - protein, 311 aa, Artificial Sequence
  TCR beta chain sequence
MGTSLLCWMALCLLGADHADTGVSQDPRHKITKRGQNVTFRCDPISEHNRLYWYRQTLGQGPEFLTYFQNEAQLEKSRLLSDRFSAERPKGSFSTLEIQRTEQGDSAMYLCASSETTLSEQFFGPGTRLTVLEDLKNVFPPEVAVFEPSEAEISHTQKATLVCLATGFYPDHVELSWWVNGKEVHSGVSTDPQPLKEQPALNDSRYCLSSRLRVSATFWQNPRNHFRCQVQFYGLSENDEWTQDRAKPVTQIVSAEAWGRADCGFTSESYQQGVLSATILYEILLGKATLYAVLVSALVLMAMVKRKDSRG

SEQ ID NO: 204 - DNA, 399 bp, Artificial Sequence
  TCR Vbeta sequence
atgggtaccagcctcctctgctggatggccctgtgtctcctgggggcagatcacgcagatactggagtctcccaggaccccagacacaagatcacaaagaggggacagaatgtaactttcaggtgtgatccaatttctgaacacaaccgcctttattggtaccgacagaccctggggcagggcccagagtttctgacttacttccagaatgaagctcaactagaaaaatcaaggctgctcagtgatcggttctctgcagagaggcctaagggatctttctccaccttggagatccagcgcacagagcagggggactcggccatgtatctctgtgccagcagtgaaactacgctaagtgagcagttcttcgggccagggacacggctcaccgtgctagag

SEQ ID NO: 205 - DNA, 936 bp, Artificial Sequence
  TCR beta chain sequence
atgggtaccagcctcctctgctggatggccctgtgtctcctgggggcagatcacgcagatactggagtctcccaggaccccagacacaagatcacaaagaggggacagaatgtaactttcaggtgtgatccaatttctgaacacaaccgcctttattggtaccgacagaccctggggcagggcccagagtttctgacttacttccagaatgaagctcaactagaaaaatcaaggctgctcagtgatcggttctctgcagagaggcctaagggatctttctccaccttggagatccagcgcacagagcagggggactcggccatgtatctctgtgccagcagtgaaactacgctaagtgagcagttcttcgggccagggacacggctcaccgtgctagaggacctgaaaaacgtgttcccacccgaggtcgctgtgtttgagccatcagaagcagagatctcccacacccaaaaggccacactggtatgcctggccacaggcttctaccccgaccacgtggagctgagctggtgggtgaatgggaaggaggtgcacagtggggtcagcacagacccgcagcccctcaaggagcagcccgccctcaatgactccagatactgcctgagcagccgcctgagggtctcggccaccttctggcagaacccccgcaaccacttccgctgtcaagtccagttctacgggctctcggagaatgacgagtggacccaggatagggccaaacctgtcacccagatcgtcagcgccgaggcctggggtagagcagactgtggcttcacctccgagtcttaccagcaaggggtcctgtctgccaccatcctctatgagatcttgctagggaaggccaccttgtatgccgtgctggtcagtgccctcgtgctgatggccatggtcaagagaaaggattccagaggctag

SEQ ID NO: 206 - DNA, 1809 bp, Artificial Sequence
  TCR sequence
atgtccattcgagctttatttatattcctgtggctgcagctggacttggtgaatggagagaatgtggagcagcatccttcaaccctgagtgtccaggagggagacagcgctgttatcaagtgtacttattcagacagtgcctcaaactacttcccttggtataagcaagaacttggaaaaagacctcagcttattatagacattcgttcaaatgtgggcgaaaagaaagaccaacgaattgctgttacattgaacaagacagccaaacatttctccctgcacatcacagagacccaacctgaagactcggctgtctacttctgtgcagcaatagtcggtaaccagttctattttgggacagggacaagtttgacggtcattccaaatatccagaagcctgaccctgccgtgtaccagctgagagactctaaatccagtgacaagtctgtctgcctattcaccgattttgattctcaaacaaatgtgtcacaaagtaaggattctgatgtgtatatcacagacaaaactgtgctagacatgaggtctatggacttcaagagcaacagtgctgtggcctggagcaacaaatctgactttgcatgtgcaaacgccttcaacaacagcattattccagaagacaccttcttccccagcccagaaagttcctgtgatgtcaagctggtcgagaaaagctttgaaacagatacgaacctaaactttcaaaacctgtcagtgattgggttccgaatcctcctcctgaaagtggccgggtttaatctgctcatgacgctgcggctgtggtccagcggctccggagccacgaacttctctctgttaaagcaagcaggagacgtggaagaaaaccccggtcccatgggtaccagcctcctctgctggatggccctgtgtctcctgggggcagatcacgcagatactggagtctcccaggaccccagacacaagatcacaaagaggggacagaatgtaactttcaggtgtgatccaatttctgaacacaaccgcctttattggtaccgacagaccctggggcagggcccagagtttctgacttacttccagaatgaagctcaactagaaaaatcaaggctgctcagtgatcggttctctgcagagaggcctaagggatctttctccaccttggagatccagcgcacagagcagggggactcggccatgtatctctgtgccagcagtgaaactacgctaagtgagcagttcttcgggccagggacacggctcaccgtgctagaggacctgaaaaacgtgttcccacccgaggtcgctgtgtttgagccatcagaagcagagatctcccacacccaaaaggccacactggtatgcctggccacaggcttctaccccgaccacgtggagctgagctggtgggtgaatgggaaggaggtgcacagtggggtcagcacagacccgcagcccctcaaggagcagcccgccctcaatgactccagatactgcctgagcagccgcctgagggtctcggccaccttctggcagaacccccgcaaccacttccgctgtcaagtccagttctacgggctctcggagaatgacgagtggacccaggatagggccaaacctgtcacccagatcgtcagcgccgaggcctggggtagagcagactgtggcttcacctccgagtcttaccagcaaggggtcctgtctgccaccatcctctatgagatcttgctagggaaggccaccttgtatgccgtgctggtcagtgccctcgtgctgatggccatggtcaagagaaaggattccagaggctag

SEQ ID NO: 207 - protein, 602 aa, Artificial Sequence
  TCR sequence
MSIRALFIFLWLQLDLVNGENVEQHPSTLSVQEGDSAVIKCTYSDSASNYFPWYKQELGKRPQLIIDIRSNVGEKKDQRIAVTLNKTAKHFSLHITETQPEDSAVYFCAAIVGNQFYFGTGTSLTVIPNIQKPDPAVYQLRDSKSSDKSVCLFTDFDSQTNVSQSKDSDVYITDKTVLDMRSMDFKSNSAVAWSNKSDFACANAFNNSIIPEDTFFPSPESSCDVKLVEKSFETDTNLNFQNLSVIGFRILLLKVAGFNLLMTLRLWSSGSGATNFSLLKQAGDVEENPGPMGTSLLCWMALCLLGADHADTGVSQDPRHKITKRGQNVTFRCDPISEHNRLYWYRQTLGQGPEFLTYFQNEAQLEKSRLLSDRFSAERPKGSFSTLEIQRTEQGDSAMYLCASSETTLSEQFFGPGTRLTVLEDLKNVFPPEVAVFEPSEAEISHTQKATLVCLATGFYPDHVELSWWVNGKEVHSGVSTDPQPLKEQPALNDSRYCLSSRLRVSATFWQNPRNHFRCQVQFYGLSENDEWTQDRAKPVTQIVSAEAWGRADCGFTSESYQQGVLSATILYEILLGKATLYAVLVSALVLMAMVKRKDSRG

SEQ ID NO: 208 - protein, 9 aa, Artificial Sequence
  TCR Valpha CDR-3 sequence
AMRNNNDMR

SEQ ID NO: 209 - protein, 111 aa, Artificial Sequence
  TCR Valpha sequence
GENVEQHPSTLSVQEGDSAVIKCTYSDSASNYFPWYKQELGKRPQLIIDIRSNVGEKKDQRIAVTLNKTAKHFSLHITETQPEDSAVYFCAMRNNNDMRFGAGTRLTVKPN

SEQ ID NO: 210 - protein, 129 aa, Artificial Sequence
  TCR Valpha sequence
MSIRAVFIFLWLQLDLVNGENVEQHPSTLSVQEGDSAVIKCTYSDSASNYFPWYKQELGKRPQLIIDIRSNVGEKKDQRIAVTLNKTAKHFSLHITETQPEDSAVYFCAMRNNNDMRFGAGTRLTVKPN

SEQ ID NO: 211 - protein, 269 aa, Artificial Sequence
  TCR alpha chain sequence
MSIRAVFIFLWLQLDLVNGENVEQHPSTLSVQEGDSAVIKCTYSDSASNYFPWYKQELGKRPQLIIDIRSNVGEKKDQRIAVTLNKTAKHFSLHITETQPEDSAVYFCAMRNNNDMRFGAGTRLTVKPNIQNPDPAVYQLRDSKSSDKSVCLFTDFDSQTNVSQSKDSDVYITDKTVLDMRSMDFKSNSAVAWSNKSDFACANAFNNSIIPEDTFFPSPESSCDVKLVEKSFETDTNLNFQNLSVIGFRILLLKVAGFNLLMTLRLWSS

SEQ ID NO: 212 - DNA, 387 bp, Artificial Sequence
  TCR Valpha sequence
atgtccattcgagctgtatttatattcctgtggctgcagctggacttggtgaatggagagaatgtggagcagcatccttcaaccctgagtgtccaggagggagacagcgctgttatcaagtgtacttattcagacagtgcctcaaactacttcccttggtataagcaagaacttggaaaaagacctcagcttattatagacattcgttcaaatgtgggcgaaaagaaagaccaacgaattgctgttacattgaacaagacagccaaacatttctccctgcacatcacagagacccaacctgaagactcggctgtctacttctgtgcaatgagaaataacaatgacatgcgctttggagcagggaccagactgacagtaaaaccaaat

SEQ ID NO: 213 - DNA, 807 bp, Artificial Sequence
  TCR alpha chain sequence
atgtccattcgagctgtatttatattcctgtggctgcagctggacttggtgaatggagagaatgtggagcagcatccttcaaccctgagtgtccaggagggagacagcgctgttatcaagtgtacttattcagacagtgcctcaaactacttcccttggtataagcaagaacttggaaaaagacctcagcttattatagacattcgttcaaatgtgggcgaaaagaaagaccaacgaattgctgttacattgaacaagacagccaaacatttctccctgcacatcacagagacccaacctgaagactcggctgtctacttctgtgcaatgagaaataacaatgacatgcgctttggagcagggaccagactgacagtaaaaccaaatatccagaaccctgaccctgccgtgtaccagctgagagactctaaatccagtgacaagtctgtctgcctattcaccgattttgattctcaaacaaatgtgtcacaaagtaaggattctgatgtgtatatcacagacaaaactgtgctagacatgaggtctatggacttcaagagcaacagtgctgtggcctggagcaacaaatctgactttgcatgtgcaaacgccttcaacaacagcattattccagaagacaccttcttccccagcccagaaagttcctgtgatgtcaagctggtcgagaaaagctttgaaacagatacgaacctaaactttcaaaacctgtcagtgattgggttccgaatcctcctcctgaaagtggccgggtttaatctgctcatgacgctgcggctgtggtccagc

SEQ ID NO: 214 - protein, 11 aa, Artificial Sequence
  TCR Vbeta CDR-3 sequence
ASSLTTLDTQY

SEQ ID NO: 215 - protein, 113 aa, Artificial Sequence
  TCR Vbeta sequence
DTGVSQDPRHKITKRGQNVTFRCDPISEHNRLYWYRQTLGQGPEFLTYFQNEAQLEKSRLLSDRFSAERPKGSFSTLEIQRTEQGDSAMYLCASSLTTLDTQYFGPGTRLTVL

SEQ ID NO: 216 - protein, 132 aa, Artificial Sequence
  TCR Vbeta sequence
MGTSLLCWMALCLLGADHADTGVSQDPRHKITKRGQNVTFRCDPISEHNRLYWYRQTLGQGPEFLTYFQNEAQLEKSRLLSDRFSAERPKGSFSTLEIQRTEQGDSAMYLCASSLTTLDTQYFGPGTRLTVL

SEQ ID NO: 217 - protein, 311 aa, Artificial Sequence
  TCR beta chain sequence
MGTSLLCWMALCLLGADHADTGVSQDPRHKITKRGQNVTFRCDPISEHNRLYWYRQTLGQGPEFLTYFQNEAQLEKSRLLSDRFSAERPKGSFSTLEIQRTEQGDSAMYLCASSLTTLDTQYFGPGTRLTVLEDLKNVFPPEVAVFEPSEAEISHTQKATLVCLATGFYPDHVELSWWVNGKEVHSGVSTDPQPLKEQPALNDSRYCLSSRLRVSATFWQNPRNHFRCQVQFYGLSENDEWTQDRAKPVTQIVSAEAWGRADCGFTSESYQQGVLSATILYEILLGKATLYAVLVSALVLMAMVKRKDSRG

SEQ ID NO: 218 - DNA, 399 bp, Artificial Sequence
  TCR Vbeta sequence
atgggtaccagcctcctctgctggatggccctgtgtctcctgggggcagatcacgcagatactggagtctcccaggaccccagacacaagatcacaaagaggggacagaatgtaactttcaggtgtgatccaatttctgaacacaaccgcctttattggtaccgacagaccctggggcagggcccagagtttctgacttacttccagaatgaagctcaactagaaaaatcaaggctgctcagtgatcggttctctgcagagaggcctaagggatctttctccaccttggagatccagcgcacagagcagggggactcggccatgtatctctgtgccagcagcttaacaacattggatacgcagtattttggcccaggcacccggctgacagtgctcgag

SEQ ID NO: 219 - DNA, 936 bp, Artificial Sequence
  TCR beta chain sequence
atgggtaccagcctcctctgctggatggccctgtgtctcctgggggcagatcacgcagatactggagtctcccaggaccccagacacaagatcacaaagaggggacagaatgtaactttcaggtgtgatccaatttctgaacacaaccgcctttattggtaccgacagaccctggggcagggcccagagtttctgacttacttccagaatgaagctcaactagaaaaatcaaggctgctcagtgatcggttctctgcagagaggcctaagggatctttctccaccttggagatccagcgcacagagcagggggactcggccatgtatctctgtgccagcagcttaacaacattggatacgcagtattttggcccaggcacccggctgacagtgctcgaggacctgaaaaacgtgttcccacccgaggtcgctgtgtttgagccatcagaagcagagatctcccacacccaaaaggccacactggtatgcctggccacaggcttctaccccgaccacgtggagctgagctggtgggtgaatgggaaggaggtgcacagtggggtcagcacagacccgcagcccctcaaggagcagcccgccctcaatgactccagatactgcctgagcagccgcctgagggtctcggccaccttctggcagaacccccgcaaccacttccgctgtcaagtccagttctacgggctctcggagaatgacgagtggacccaggatagggccaaacctgtcacccagatcgtcagcgccgaggcctggggtagagcagactgtggcttcacctccgagtcttaccagcaaggggtcctgtctgccaccatcctctatgagatcttgctagggaaggccaccttgtatgccgtgctggtcagtgccctcgtgctgatggccatggtcaagagaaaggattccagaggctag

SEQ ID NO: 220 - DNA, 1809 bp, Artificial Sequence
  TCR sequence
atgtccattcgagctgtatttatattcctgtggctgcagctggacttggtgaatggagagaatgtggagcagcatccttcaaccctgagtgtccaggagggagacagcgctgttatcaagtgtacttattcagacagtgcctcaaactacttcccttggtataagcaagaacttggaaaaagacctcagcttattatagacattcgttcaaatgtgggcgaaaagaaagaccaacgaattgctgttacattgaacaagacagccaaacatttctccctgcacatcacagagacccaacctgaagactcggctgtctacttctgtgcaatgagaaataacaatgacatgcgctttggagcagggaccagactgacagtaaaaccaaatatccagaaccctgaccctgccgtgtaccagctgagagactctaaatccagtgacaagtctgtctgcctattcaccgattttgattctcaaacaaatgtgtcacaaagtaaggattctgatgtgtatatcacagacaaaactgtgctagacatgaggtctatggacttcaagagcaacagtgctgtggcctggagcaacaaatctgactttgcatgtgcaaacgccttcaacaacagcattattccagaagacaccttcttccccagcccagaaagttcctgtgatgtcaagctggtcgagaaaagctttgaaacagatacgaacctaaactttcaaaacctgtcagtgattgggttccgaatcctcctcctgaaagtggccgggtttaatctgctcatgacgctgcggctgtggtccagcggctccggagccacgaacttctctctgttaaagcaagcaggagacgtggaagaaaaccccggtcccatgggtaccagcctcctctgctggatggccctgtgtctcctgggggcagatcacgcagatactggagtctcccaggaccccagacacaagatcacaaagaggggacagaatgtaactttcaggtgtgatccaatttctgaacacaaccgcctttattggtaccgacagaccctggggcagggcccagagtttctgacttacttccagaatgaagctcaactagaaaaatcaaggctgctcagtgatcggttctctgcagagaggcctaagggatctttctccaccttggagatccagcgcacagagcagggggactcggccatgtatctctgtgccagcagcttaacaacattggatacgcagtattttggcccaggcacccggctgacagtgctcgaggacctgaaaaacgtgttcccacccgaggtcgctgtgtttgagccatcagaagcagagatctcccacacccaaaaggccacactggtatgcctggccacaggcttctaccccgaccacgtggagctgagctggtgggtgaatgggaaggaggtgcacagtggggtcagcacagacccgcagcccctcaaggagcagcccgccctcaatgactccagatactgcctgagcagccgcctgagggtctcggccaccttctggcagaacccccgcaaccacttccgctgtcaagtccagttctacgggctctcggagaatgacgagtggacccaggatagggccaaacctgtcacccagatcgtcagcgccgaggcctggggtagagcagactgtggcttcacctccgagtcttaccagcaaggggtcctgtctgccaccatcctctatgagatcttgctagggaaggccaccttgtatgccgtgctggtcagtgccctcgtgctgatggccatggtcaagagaaaggattccagaggctag

SEQ ID NO: 221 - protein, 602 aa, Artificial Sequence
  TCR sequence
MSIRAVFIFLWLQLDLVNGENVEQHPSTLSVQEGDSAVIKCTYSDSASNYFPWYKQELGKRPQLIIDIRSNVGEKKDQRIAVTLNKTAKHFSLHITETQPEDSAVYFCAMRNNNDMRFGAGTRLTVKPNIQNPDPAVYQLRDSKSSDKSVCLFTDFDSQTNVSQSKDSDVYITDKTVLDMRSMDFKSNSAVAWSNKSDFACANAFNNSIIPEDTFFPSPESSCDVKLVEKSFETDTNLNFQNLSVIGFRILLLKVAGFNLLMTLRLWSSGSGATNFSLLKQAGDVEENPGPMGTSLLCWMALCLLGADHADTGVSQDPRHKITKRGQNVTFRCDPISEHNRLYWYRQTLGQGPEFLTYFQNEAQLEKSRLLSDRFSAERPKGSFSTLEIQRTEQGDSAMYLCASSLTTLDTQYFGPGTRLTVLEDLKNVFPPEVAVFEPSEAEISHTQKATLVCLATGFYPDHVELSWWVNGKEVHSGVSTDPQPLKEQPALNDSRYCLSSRLRVSATFWQNPRNHFRCQVQFYGLSENDEWTQDRAKPVTQIVSAEAWGRADCGFTSESYQQGVLSATILYEILLGKATLYAVLVSALVLMAMVKRKDSRG

SEQ ID NO: 222 - protein, 6 aa, Artificial Sequence
  TCR Valpha CDR-1 sequence
YGGTVN

SEQ ID NO: 223 - protein, 8 aa, Artificial Sequence
  TCR Valpha CDR-2 sequence
YFSGDPLV

SEQ ID NO: 224 - protein, 13 aa, Artificial Sequence
  TCR Valpha CDR-3 sequence
AVRDSGAGSYQLT

SEQ ID NO: 225 - protein, 116 aa, Artificial Sequence
  TCR Valpha sequence
AQSVSQHNHHVILSEAASLELGCNYSYGGTVNLFWYVQYPGQHLQLLLKYFSGDPLVKGIKGFEAEFIKSKFSFNLRKPSVQWSDTAEYFCAVRDSGAGSYQLTFGKGTKLSVIPN

SEQ ID NO: 226 - protein, 135 aa, Artificial Sequence
  TCR Valpha sequence
MLLLLIPVLGMIFALRDARAQSVSQHNHHVILSEAASLELGCNYSYGGTVNLFWYVQYPGQHLQLLLKYFSGDPLVKGIKGFEAEFIKSKFSFNLRKPSVQWSDTAEYFCAVRDSGAGSYQLTFGKGTKLSVIPN

SEQ ID NO: 227 - protein, 275 aa, Artificial Sequence
  TCR alpha chain sequence
MLLLLIPVLGMIFALRDARAQSVSQHNHHVILSEAASLELGCNYSYGGTVNLFWYVQYPGQHLQLLLKYFSGDPLVKGIKGFEAEFIKSKFSFNLRKPSVQWSDTAEYFCAVRDSGAGSYQLTFGKGTKLSVIPNIQNPDPAVYQLRDSKSSDKSVCLFTDFDSQTNVSQSKDSDVYITDKTVLDMRSMDFKSNSAVAWSNKSDFACANAFNNSIIPEDTFFPSPESSCDVKLVEKSFETDTNLNFQNLSVIGFRILLLKVAGFNLLMTLRLWSS

SEQ ID NO: 228 - DNA, 405 bp, Artificial Sequence
  TCR Valpha sequence
atgctcctgttgctcataccagtgctggggatgatttttgccctgagagatgccagagcccagtctgtgagccagcataaccaccacgtaattctctctgaagcagcctcactggagttgggatgcaactattcctatggtggaactgttaatctcttctggtatgtccagtaccctggtcaacaccttcagcttctcctcaagtacttttcaggggatccactggttaaaggcatcaagggctttgaggctgaatttataaagagtaaattctcctttaatctgaggaaaccctctgtgcagtggagtgacacagctgagtacttctgtgccgtgagggactctggggctgggagttaccaactcactttcgggaaggggaccaaactctcggtcataccaaat

SEQ ID NO: 229 - DNA, 825 bp, Artificial Sequence
  TCR alpha chain sequence
atgctcctgttgctcataccagtgctggggatgatttttgccctgagagatgccagagcccagtctgtgagccagcataaccaccacgtaattctctctgaagcagcctcactggagttgggatgcaactattcctatggtggaactgttaatctcttctggtatgtccagtaccctggtcaacaccttcagcttctcctcaagtacttttcaggggatccactggttaaaggcatcaagggctttgaggctgaatttataaagagtaaattctcctttaatctgaggaaaccctctgtgcagtggagtgacacagctgagtacttctgtgccgtgagggactctggggctgggagttaccaactcactttcgggaaggggaccaaactctcggtcataccaaatatccagaaccctgaccctgccgtgtaccagctgagagactctaaatccagtgacaagtctgtctgcctattcaccgattttgattctcaaacaaatgtgtcacaaagtaaggattctgatgtgtatatcacagacaaaactgtgctagacatgaggtctatggacttcaagagcaacagtgctgtggcctggagcaacaaatctgactttgcatgtgcaaacgccttcaacaacagcattattccagaagacaccttcttccccagcccagaaagttcctgtgatgtcaagctggtcgagaaaagctttgaaacagatacgaacctaaactttcaaaacctgtcagtgattgggttccgaatcctcctcctgaaagtggccgggtttaatctgctcatgacgctgcggctgtggtccagc

SEQ ID NO: 230 - protein, 12 aa, Artificial Sequence
  TCR Vbeta CDR-3 sequence
ASLTGTVYNEQF

SEQ ID NO: 231 - protein, 115 aa, Artificial Sequence
  TCR Vbeta sequence
DTGVSQDPRHKITKRGQNVTFRCDPISEHNRLYWYRQTLGQGPEFLTYFQNEAQLEKSRLLSDRFSAERPKGSFSTLEIQRTEQGDSAMYLCASLTGTVYNEQFFGPGTRLTVLE

SEQ ID NO: 232 - protein, 134 aa, Artificial Sequence
  TCR Vbeta sequence
MGTSLLCWMALCLLGADHADTGVSQDPRHKITKRGQNVTFRCDPISEHNRLYWYRQTLGQGPEFLTYFQNEAQLEKSRLLSDRFSAERPKGSFSTLEIQRTEQGDSAMYLCASLTGTVYNEQFFGPGTRLTVLE

SEQ ID NO: 233 - protein, 312 aa, Artificial Sequence
  TCR beta chain sequence
MGTSLLCWMALCLLGADHADTGVSQDPRHKITKRGQNVTFRCDPISEHNRLYWYRQTLGQGPEFLTYFQNEAQLEKSRLLSDRFSAERPKGSFSTLEIQRTEQGDSAMYLCASLTGTVYNEQFFGPGTRLTVLEDLKNVFPPEVAVFEPSEAEISHTQKATLVCLATGFYPDHVELSWWVNGKEVHSGVSTDPQPLKEQPALNDSRYCLSSRLRVSATFWQNPRNHFRCQVQFYGLSENDEWTQDRAKPVTQIVSAEAWGRADCGFTSESYQQGVLSATILYEILLGKATLYAVLVSALVLMAMVKRKDSRG

SEQ ID NO: 234 - DNA, 402 bp, Artificial Sequence
  TCR Vbeta sequence
atgggtaccagcctcctctgctggatggccctgtgtctcctgggggcagatcacgcagatactggagtctcccaggaccccagacacaagatcacaaagaggggacagaatgtaactttcaggtgtgatccaatttctgaacacaaccgcctttattggtaccgacagaccctggggcagggcccagagtttctgacttacttccagaatgaagctcaactagaaaaatcaaggctgctcagtgatcggttctctgcagagaggcctaagggatctttctccaccttggagatccagcgcacagagcagggggactcggccatgtatctctgtgccagccttaccgggacagtctacaatgagcagttcttcgggccagggacacggctcaccgtgctagag

SEQ ID NO: 235 - DNA, 939 bp, Artificial Sequence
  TCR beta chain sequence
atgggtaccagcctcctctgctggatggccctgtgtctcctgggggcagatcacgcagatactggagtctcccaggaccccagacacaagatcacaaagaggggacagaatgtaactttcaggtgtgatccaatttctgaacacaaccgcctttattggtaccgacagaccctggggcagggcccagagtttctgacttacttccagaatgaagctcaactagaaaaatcaaggctgctcagtgatcggttctctgcagagaggcctaagggatctttctccaccttggagatccagcgcacagagcagggggactcggccatgtatctctgtgccagccttaccgggacagtctacaatgagcagttcttcgggccagggacacggctcaccgtgctagaggacctgaaaaacgtgttcccacccgaggtcgctgtgtttgagccatcagaagcagagatctcccacacccaaaaggccacactggtatgcctggccacaggcttctaccccgaccacgtggagctgagctggtgggtgaatgggaaggaggtgcacagtggggtcagcacagacccgcagcccctcaaggagcagcccgccctcaatgactccagatactgcctgagcagccgcctgagggtctcggccaccttctggcagaacccccgcaaccacttccgctgtcaagtccagttctacgggctctcggagaatgacgagtggacccaggatagggccaaacctgtcacccagatcgtcagcgccgaggcctggggtagagcagactgtggcttcacctccgagtcttaccagcaaggggtcctgtctgccaccatcctctatgagatcttgctagggaaggccaccttgtatgccgtgctggtcagtgccctcgtgctgatggccatggtcaagagaaaggattccagaggctag

SEQ ID NO: 236 - DNA, 1830 bp, Artificial Sequence
  TCR sequence
atgctcctgttgctcataccagtgctggggatgatttttgccctgagagatgccagagcccagtctgtgagccagcataaccaccacgtaattctctctgaagcagcctcactggagttgggatgcaactattcctatggtggaactgttaatctcttctggtatgtccagtaccctggtcaacaccttcagcttctcctcaagtacttttcaggggatccactggttaaaggcatcaagggctttgaggctgaatttataaagagtaaattctcctttaatctgaggaaaccctctgtgcagtggagtgacacagctgagtacttctgtgccgtgagggactctggggctgggagttaccaactcactttcgggaaggggaccaaactctcggtcataccaaatatccagaaccctgaccctgccgtgtaccagctgagagactctaaatccagtgacaagtctgtctgcctattcaccgattttgattctcaaacaaatgtgtcacaaagtaaggattctgatgtgtatatcacagacaaaactgtgctagacatgaggtctatggacttcaagagcaacagtgctgtggcctggagcaacaaatctgactttgcatgtgcaaacgccttcaacaacagcattattccagaagacaccttcttccccagcccagaaagttcctgtgatgtcaagctggtcgagaaaagctttgaaacagatacgaacctaaactttcaaaacctgtcagtgattgggttccgaatcctcctcctgaaagtggccgggtttaatctgctcatgacgctgcggctgtggtccagcggctccggagccacgaacttctctctgttaaagcaagcaggagacgtggaagaaaaccccggtcccatgggtaccagcctcctctgctggatggccctgtgtctcctgggggcagatcacgcagatactggagtctcccaggaccccagacacaagatcacaaagaggggacagaatgtaactttcaggtgtgatccaatttctgaacacaaccgcctttattggtaccgacagaccctggggcagggcccagagtttctgacttacttccagaatgaagctcaactagaaaaatcaaggctgctcagtgatcggttctctgcagagaggcctaagggatctttctccaccttggagatccagcgcacagagcagggggactcggccatgtatctctgtgccagccttaccgggacagtctacaatgagcagttcttcgggccagggacacggctcaccgtgctagaggacctgaaaaacgtgttcccacccgaggtcgctgtgtttgagccatcagaagcagagatctcccacacccaaaaggccacactggtatgcctggccacaggcttctaccccgaccacgtggagctgagctggtgggtgaatgggaaggaggtgcacagtggggtcagcacagacccgcagcccctcaaggagcagcccgccctcaatgactccagatactgcctgagcagccgcctgagggtctcggccaccttctggcagaacccccgcaaccacttccgctgtcaagtccagttctacgggctctcggagaatgacgagtggacccaggatagggccaaacctgtcacccagatcgtcagcgccgaggcctggggtagagcagactgtggcttcacctccgagtcttaccagcaaggggtcctgtctgccaccatcctctatgagatcttgctagggaaggccaccttgtatgccgtgctggtcagtgccctcgtgctgatggccatggtcaagagaaaggattccagaggctag

SEQ ID NO: 237 - protein, 609 aa, Artificial Sequence
  TCR sequence
MLLLLIPVLGMIFALRDARAQSVSQHNHHVILSEAASLELGCNYSYGGTVNLFWYVQYPGQHLQLLLKYFSGDPLVKGIKGFEAEFIKSKFSFNLRKPSVQWSDTAEYFCAVRDSGAGSYQLTFGKGTKLSVIPNIQNPDPAVYQLRDSKSSDKSVCLFTDFDSQTNVSQSKDSDVYITDKTVLDMRSMDFKSNSAVAWSNKSDFACANAFNNSIIPEDTFFPSPESSCDVKLVEKSFETDTNLNFQNLSVIGFRILLLKVAGFNLLMTLRLWSSGSGATNFSLLKQAGDVEENPGPMGTSLLCWMALCLLGADHADTGVSQDPRHKITKRGQNVTFRCDPISEHNRLYWYRQTLGQGPEFLTYFQNEAQLEKSRLLSDRFSAERPKGSFSTLEIQRTEQGDSAMYLCASLTGTVYNEQFFGPGTRLTVLEDLKNVFPPEVAVFEPSEAEISHTQKATLVCLATGFYPDHVELSWWVNGKEVHSGVSTDPQPLKEQPALNDSRYCLSSRLRVSATFWQNPRNHFRCQVQFYGLSENDEWTQDRAKPVTQIVSAEAWGRADCGFTSESYQQGVLSATILYEILLGKATLYAVLVSALVLMAMVKRKDSRG

SEQ ID NO: 238 - protein, 13 aa, Artificial Sequence
  TCR Valpha CDR-3 sequence
AASNPTGANSKLT

SEQ ID NO: 239 - protein, 115 aa, Artificial Sequence
  TCR Valpha sequence
GENVEQHPSTLSVQEGDSAVIKCTYSDSASNYFPWYKQELGKRPQLIIDIRSNVGEKKDQRIAVTLNKTAKHFSLHITETQPEDSAVYFCAASNPTGANSKLTFGKGITLSVRPD

SEQ ID NO: 240 - protein, 133 aa, Artificial Sequence
  TCR Valpha sequence
MSIRAVFIFLWLQLDLVNGENVEQHPSTLSVQEGDSAVIKCTYSDSASNYFPWYKQELGKRPQLIIDIRSNVGEKKDQRIAVTLNKTAKHFSLHITETQPEDSAVYFCAASNPTGANSKLTFGKGITLSVRPD

SEQ ID NO: 241 - protein, 273 aa, Artificial Sequence
  TCR alpha chain sequence
MSIRAVFIFLWLQLDLVNGENVEQHPSTLSVQEGDSAVIKCTYSDSASNYFPWYKQELGKRPQLIIDIRSNVGEKKDQRIAVTLNKTAKHFSLHITETQPEDSAVYFCAASNPTGANSKLTFGKGITLSVRPDIQKPDPAVYQLRDSKSSDKSVCLFTDFDSQTNVSQSKDSDVYITDKTVLDMRSMDFKSNSAVAWSNKSDFACANAFNNSIIPEDTFFPSPESSCDVKLVEKSFETDTNLNFQNLSVIGFRILLLKVAGFNLLMTLRLWSS

SEQ ID NO: 242 - DNA, 399 bp, Artificial Sequence
  TCR Valpha sequence
atgtccattcgagctgtatttatattcctgtggctgcagctggacttggtgaatggagagaatgtggagcagcatccttcaaccctgagtgtccaggagggagacagcgctgttatcaagtgtacttattcagacagtgcctcaaactacttcccttggtataagcaagaacttggaaaaagacctcagcttattatagacattcgttcaaatgtgggcgaaaagaaagaccaacgaattgctgttacattgaacaagacagccaaacatttctccctgcacatcacagagacccaacctgaagactcggctgtctacttctgtgcagcaagtaaccctactggagccaatagtaagctgacatttggaaaaggaataactctgagtgttagaccagat

SEQ ID NO: 243 - DNA, 819 bp, Artificial Sequence
  TCR alpha chain sequence
atgtccattcgagctgtatttatattcctgtggctgcagctggacttggtgaatggagagaatgtggagcagcatccttcaaccctgagtgtccaggagggagacagcgctgttatcaagtgtacttattcagacagtgcctcaaactacttcccttggtataagcaagaacttggaaaaagacctcagcttattatagacattcgttcaaatgtgggcgaaaagaaagaccaacgaattgctgttacattgaacaagacagccaaacatttctccctgcacatcacagagacccaacctgaagactcggctgtctacttctgtgcagcaagtaaccctactggagccaatagtaagctgacatttggaaaaggaataactctgagtgttagaccagatatccagaagcctgaccctgccgtgtaccagctgagagactctaaatccagtgacaagtctgtctgcctattcaccgattttgattctcaaacaaatgtgtcacaaagtaaggattctgatgtgtatatcacagacaaaactgtgctagacatgaggtctatggacttcaagagcaacagtgctgtggcctggagcaacaaatctgactttgcatgtgcaaacgccttcaacaacagcattattccagaagacaccttcttccccagcccagaaagttcctgtgatgtcaagctggtcgagaaaagctttgaaacagatacgaacctaaactttcaaaacctgtcagtgattgggttccgaatcctcctcctgaaagtggccgggtttaatctgctcatgacgctgcggctgtggtccagc

SEQ ID NO: 244 - protein, 11 aa, Artificial Sequence
  TCR Vbeta CDR-3 sequence
ASSLVRNEKLF

SEQ ID NO: 245 - protein, 114 aa, Artificial Sequence
  TCR Vbeta sequence
DTGVSQDPRHKITKRGQNVTFRCDPISEHNRLYWYRQTLGQGPEFLTYFQNEAQLEKSRLLSDRFSAERPKGSFSTLEIQRTEQGDSAMYLCASSLVRNEKLFFGSGTQLSVLE

SEQ ID NO: 246 - protein, 133 aa, Artificial Sequence
  TCR Vbeta sequence
MGTSLLCWMALCLLGADHADTGVSQDPRHKITKRGQNVTFRCDPISEHNRLYWYRQTLGQGPEFLTYFQNEAQLEKSRLLSDRFSAERPKGSFSTLEIQRTEQGDSAMYLCASSLVRNEKLFFGSGTQLSVLE

SEQ ID NO: 247 - protein, 309 aa, Artificial Sequence
  TCR beta chain sequence
MGTSLLCWMALCLLGADHADTGVSQDPRHKITKRGQNVTFRCDPISEHNRLYWYRQTLGQGPEFLTYFQNEAQLEKSRLLSDRFSAERPKGSFSTLEIQRTEQGDSAMYLCASSLVRNEKLFFGSGTQLSVLEDLNKVFPPEVAVFEPSEAEISHTQKATLVCLATGFFPDHVELSWWVNGKEVHSGVSTDPQPLKEQPALNDSRYCLSSRLRVSATFWQNPRNHFRCQVQFYGLSENDEWTQDRAKPVTQIVSAEAWGRADCGFTSVSYQQGVLSATILYEILLGKATLYAVLVSALVLMAMVKRKDF

SEQ ID NO: 248 - DNA, 399 bp, Artificial Sequence
  TCR Vbeta sequence
atgggtaccagcctcctctgctggatggccctgtgtctcctgggggcagatcacgcagatactggagtctcccaggaccccagacacaagatcacaaagaggggacagaatgtaactttcaggtgtgatccaatttctgaacacaaccgcctttattggtaccgacagaccctggggcagggcccagagtttctgacttacttccagaatgaagctcaactagaaaaatcaaggctgctcagtgatcggttctctgcagagaggcctaagggatctttctccaccttggagatccagcgcacagagcagggggactcggccatgtatctctgtgccagcagcttagtccgaaatgaaaaactgttttttggcagtggaacccagctctctgtcttggag

SEQ ID NO: 249 - DNA, 930 bp, Artificial Sequence
  TCR beta chain sequence
atgggtaccagcctcctctgctggatggccctgtgtctcctgggggcagatcacgcagatactggagtctcccaggaccccagacacaagatcacaaagaggggacagaatgtaactttcaggtgtgatccaatttctgaacacaaccgcctttattggtaccgacagaccctggggcagggcccagagtttctgacttacttccagaatgaagctcaactagaaaaatcaaggctgctcagtgatcggttctctgcagagaggcctaagggatctttctccaccttggagatccagcgcacagagcagggggactcggccatgtatctctgtgccagcagcttagtccgaaatgaaaaactgttttttggcagtggaacccagctctctgtcttggaggacctgaacaaggtgttcccacccgaggtcgctgtgtttgagccatcagaagcagagatctcccacacccaaaaggccacactggtgtgcctggccacaggcttcttccccgaccacgtggagctgagctggtgggtgaatgggaaggaggtgcacagtggggtcagcacagacccgcagcccctcaaggagcagcccgccctcaatgactccagatactgcctgagcagccgcctgagggtctcggccaccttctggcagaacccccgcaaccacttccgctgtcaagtccagttctacgggctctcggagaatgacgagtggacccaggatagggccaaacccgtcacccagatcgtcagcgccgaggcctggggtagagcagactgtggctttacctcggtgtcctaccagcaaggggtcctgtctgccaccatcctctatgagatcctgctagggaaggccaccctgtatgctgtgctggtcagcgcccttgtgttgatggccatggtcaagagaaaggatttctga

SEQ ID NO: 250 - DNA, 1815 bp, Artificial Sequence
  TCR sequence
atgtccattcgagctgtatttatattcctgtggctgcagctggacttggtgaatggagagaatgtggagcagcatccttcaaccctgagtgtccaggagggagacagcgctgttatcaagtgtacttattcagacagtgcctcaaactacttcccttggtataagcaagaacttggaaaaagacctcagcttattatagacattcgttcaaatgtgggcgaaaagaaagaccaacgaattgctgttacattgaacaagacagccaaacatttctccctgcacatcacagagacccaacctgaagactcggctgtctacttctgtgcagcaagtaaccctactggagccaatagtaagctgacatttggaaaaggaataactctgagtgttagaccagatatccagaagcctgaccctgccgtgtaccagctgagagactctaaatccagtgacaagtctgtctgcctattcaccgattttgattctcaaacaaatgtgtcacaaagtaaggattctgatgtgtatatcacagacaaaactgtgctagacatgaggtctatggacttcaagagcaacagtgctgtggcctggagcaacaaatctgactttgcatgtgcaaacgccttcaacaacagcattattccagaagacaccttcttccccagcccagaaagttcctgtgatgtcaagctggtcgagaaaagctttgaaacagatacgaacctaaactttcaaaacctgtcagtgattgggttccgaatcctcctcctgaaagtggccgggtttaatctgctcatgacgctgcggctgtggtccagcggctccggagccacgaacttctctctgttaaagcaagcaggagacgtggaagaaaaccccggtcccatgggtaccagcctcctctgctggatggccctgtgtctcctgggggcagatcacgcagatactggagtctcccaggaccccagacacaagatcacaaagaggggacagaatgtaactttcaggtgtgatccaatttctgaacacaaccgcctttattggtaccgacagaccctggggcagggcccagagtttctgacttacttccagaatgaagctcaactagaaaaatcaaggctgctcagtgatcggttctctgcagagaggcctaagggatctttctccaccttggagatccagcgcacagagcagggggactcggccatgtatctctgtgccagcagcttagtccgaaatgaaaaactgttttttggcagtggaacccagctctctgtcttggaggacctgaacaaggtgttcccacccgaggtcgctgtgtttgagccatcagaagcagagatctcccacacccaaaaggccacactggtgtgcctggccacaggcttcttccccgaccacgtggagctgagctggtgggtgaatgggaaggaggtgcacagtggggtcagcacagacccgcagcccctcaaggagcagcccgccctcaatgactccagatactgcctgagcagccgcctgagggtctcggccaccttctggcagaacccccgcaaccacttccgctgtcaagtccagttctacgggctctcggagaatgacgagtggacccaggatagggccaaacccgtcacccagatcgtcagcgccgaggcctggggtagagcagactgtggctttacctcggtgtcctaccagcaaggggtcctgtctgccaccatcctctatgagatcctgctagggaaggccaccctgtatgctgtgctggtcagcgcccttgtgttgatggccatggtcaagagaaaggatttctga

SEQ ID NO: 251 - protein, 604 aa, Artificial Sequence
  TCR sequence
MSIRAVFIFLWLQLDLVNGENVEQHPSTLSVQEGDSAVIKCTYSDSASNYFPWYKQELGKRPQLIIDIRSNVGEKKDQRIAVTLNKTAKHFSLHITETQPEDSAVYFCAASNPTGANSKLTFGKGITLSVRPDIQKPDPAVYQLRDSKSSDKSVCLFTDFDSQTNVSQSKDSDVYITDKTVLDMRSMDFKSNSAVAWSNKSDFACANAFNNSIIPEDTFFPSPESSCDVKLVEKSFETDTNLNFQNLSVIGFRILLLKVAGFNLLMTLRLWSSGSGATNFSLLKQAGDVEENPGPMGTSLLCWMALCLLGADHADTGVSQDPRHKITKRGQNVTFRCDPISEHNRLYWYRQTLGQGPEFLTYFQNEAQLEKSRLLSDRFSAERPKGSFSTLEIQRTEQGDSAMYLCASSLVRNEKLFFGSGTQLSVLEDLNKVFPPEVAVFEPSEAEISHTQKATLVCLATGFFPDHVELSWWVNGKEVHSGVSTDPQPLKEQPALNDSRYCLSSRLRVSATFWQNPRNHFRCQVQFYGLSENDEWTQDRAKPVTQIVSAEAWGRADCGFTSVSYQQGVLSATILYEILLGKATLYAVLVSALVLMAMVKRKDF

SEQ ID NO: 252 - protein, 11 aa, Artificial Sequence
  TCR Valpha CDR-3 sequence
ATEMNSNYQLI

SEQ ID NO: 253 - protein, 112 aa, Artificial Sequence
  TCR Valpha sequence
SQQGEEDPQALSIQEGENATMNCSYKTSINNLQWYRQNSGRGLVHLILIRSNEREKHSGRLRVTLDTSKKSSSLLITASRAADTASYFCATEMNSNYQLIWGAGTKLIIKPD

SEQ ID NO: 254 - protein, 132 aa, Artificial Sequence
  TCR Valpha sequence
METLLGVSLVILWLQLARVNSQQGEEDPQALSIQEGENATMNCSYKTSINNLQWYRQNSGRGLVHLILIRSNEREKHSGRLRVTLDTSKKSSSLLITASRAADTASYFCATEMNSNYQLIWGAGTKLIIKPD

SEQ ID NO: 255 - protein, 272 aa, Artificial Sequence
  TCR alpha chain sequence
METLLGVSLVILWLQLARVNSQQGEEDPQALSIQEGENATMNCSYKTSINNLQWYRQNSGRGLVHLILIRSNEREKHSGRLRVTLDTSKKSSSLLITASRAADTASYFCATEMNSNYQLIWGAGTKLIIKPDIQNPDPAVYQLRDSKSSDKSVCLFTDFDSQTNVSQSKDSDVYITDKTVLDMRSMDFKSNSAVAWSNKSDFACANAFNNSIIPEDTFFPSPESSCDVKLVEKSFETDTNLNFQNLSVIGFRILLLKVAGFNLLMTLRLWSS

SEQ ID NO: 256 - DNA, 396 bp, Artificial Sequence
  TCR Valpha sequence
atggaaactctcctgggagtgtctttggtgattctatggcttcaactggctagggtgaacagtcaacagggagaagaggatcctcaggccttgagcatccaggagggtgaaaatgccaccatgaactgcagttacaaaactagtataaacaatttacagtggtatagacaaaattcaggtagaggccttgtccacctaattttaatacgttcaaatgaaagagagaaacacagtggaagattaagagtcacgcttgacacttccaagaaaagcagttccttgttgatcacggcttcccgggcagcagacactgcttcttacttctgtgctacggaaatgaatagcaactatcagttaatctggggcgctgggaccaagctaattataaagccagat

SEQ ID NO: 257 - DNA, 816 bp, Artificial Sequence
  TCR alpha chain sequence
atggaaactctcctgggagtgtctttggtgattctatggcttcaactggctagggtgaacagtcaacagggagaagaggatcctcaggccttgagcatccaggagggtgaaaatgccaccatgaactgcagttacaaaactagtataaacaatttacagtggtatagacaaaattcaggtagaggccttgtccacctaattttaatacgttcaaatgaaagagagaaacacagtggaagattaagagtcacgcttgacacttccaagaaaagcagttccttgttgatcacggcttcccgggcagcagacactgcttcttacttctgtgctacggaaatgaatagcaactatcagttaatctggggcgctgggaccaagctaattataaagccagatatccagaaccctgaccctgccgtgtaccagctgagagactctaaatccagtgacaagtctgtctgcctattcaccgattttgattctcaaacaaatgtgtcacaaagtaaggattctgatgtgtatatcacagacaaaactgtgctagacatgaggtctatggacttcaagagcaacagtgctgtggcctggagcaacaaatctgactttgcatgtgcaaacgccttcaacaacagcattattccagaagacaccttcttccccagcccagaaagttcctgtgatgtcaagctggtcgagaaaagctttgaaacagatacgaacctaaactttcaaaacctgtcagtgattgggttccgaatcctcctcctgaaagtggccgggtttaatctgctcatgacgctgcggctgtggtccagc

SEQ ID NO: 258 - protein, 13 aa, Artificial Sequence
  TCR Vbeta CDR-3 sequence
ASSPLKGSNYGYT

SEQ ID NO: 259 - protein, 116 aa, Artificial Sequence
  TCR Vbeta sequence
DTGVSQDPRHKITKRGQNVTFRCDPISEHNRLYWYRQTLGQGPEFLTYFQNEAQLEKSRLLSDRFSAERPKGSFSTLEIQRTEQGDSAMYLCASSPLKGSNYGYTFGSGTRLTVVE

SEQ ID NO: 260 - protein, 135 aa, Artificial Sequence
  TCR Vbeta sequence
MGTSLLCWMALCLLGADHADTGVSQDPRHKITKRGQNVTFRCDPISEHNRLYWYRQTLGQGPEFLTYFQNEAQLEKSRLLSDRFSAERPKGSFSTLEIQRTEQGDSAMYLCASSPLKGSNYGYTFGSGTRLTVVE

SEQ ID NO: 261 - protein, 311 aa, Artificial Sequence
  TCR beta chain sequence
MGTSLLCWMALCLLGADHADTGVSQDPRHKITKRGQNVTFRCDPISEHNRLYWYRQTLGQGPEFLTYFQNEAQLEKSRLLSDRFSAERPKGSFSTLEIQRTEQGDSAMYLCASSPLKGSNYGYTFGSGTRLTVVEDLNKVFPPEVAVFEPSEAEISHTQKATLVCLATGFFPDHVELSWWVNGKEVHSGVSTDPQPLKEQPALNDSRYCLSSRLRVSATFWQNPRNHFRCQVQFYGLSENDEWTQDRAKPVTQIVSAEAWGRADCGFTSVSYQQGVLSATILYEILLGKATLYAVLVSALVLMAMVKRKDF

SEQ ID NO: 262 - DNA, 405 bp, Artificial Sequence
  TCR Vbeta sequence
atgggtaccagcctcctctgctggatggccctgtgtctcctgggggcagatcacgcagatactggagtctcccaggaccccagacacaagatcacaaagaggggacagaatgtaactttcaggtgtgatccaatttctgaacacaaccgcctttattggtaccgacagaccctggggcagggcccagagtttctgacttacttccagaatgaagctcaactagaaaaatcaaggctgctcagtgatcggttctctgcagagaggcctaagggatctttctccaccttggagatccagcgcacagagcagggggactcggccatgtatctctgtgccagcagccccctaaagggctccaactatggctacaccttcggttcggggaccaggttaaccgttgtagag

SEQ ID NO: 263 - DNA, 936 bp, Artificial Sequence
  TCR beta chain sequence
atgggtaccagcctcctctgctggatggccctgtgtctcctgggggcagatcacgcagatactggagtctcccaggaccccagacacaagatcacaaagaggggacagaatgtaactttcaggtgtgatccaatttctgaacacaaccgcctttattggtaccgacagaccctggggcagggcccagagtttctgacttacttccagaatgaagctcaactagaaaaatcaaggctgctcagtgatcggttctctgcagagaggcctaagggatctttctccaccttggagatccagcgcacagagcagggggactcggccatgtatctctgtgccagcagccccctaaagggctccaactatggctacaccttcggttcggggaccaggttaaccgttgtagaggacctgaacaaggtgttcccacccgaggtcgctgtgtttgagccatcagaagcagagatctcccacacccaaaaggccacactggtgtgcctggccacaggcttcttccccgaccacgtggagctgagctggtgggtgaatgggaaggaggtgcacagtggggtcagcacagacccgcagcccctcaaggagcagcccgccctcaatgactccagatactgcctgagcagccgcctgagggtctcggccaccttctggcagaacccccgcaaccacttccgctgtcaagtccagttctacgggctctcggagaatgacgagtggacccaggatagggccaaacccgtcacccagatcgtcagcgccgaggcctggggtagagcagactgtggctttacctcggtgtcctaccagcaaggggtcctgtctgccaccatcctctatgagatcctgctagggaaggccaccctgtatgctgtgctggtcagcgcccttgtgttgatggccatggtcaagagaaaggatttctga

SEQ ID NO: 264 - DNA, 1818 bp, Artificial Sequence
  TCR sequence
atggaaactctcctgggagtgtctttggtgattctatggcttcaactggctagggtgaacagtcaacagggagaagaggatcctcaggccttgagcatccaggagggtgaaaatgccaccatgaactgcagttacaaaactagtataaacaatttacagtggtatagacaaaattcaggtagaggccttgtccacctaattttaatacgttcaaatgaaagagagaaacacagtggaagattaagagtcacgcttgacacttccaagaaaagcagttccttgttgatcacggcttcccgggcagcagacactgcttcttacttctgtgctacggaaatgaatagcaactatcagttaatctggggcgctgggaccaagctaattataaagccagatatccagaaccctgaccctgccgtgtaccagctgagagactctaaatccagtgacaagtctgtctgcctattcaccgattttgattctcaaacaaatgtgtcacaaagtaaggattctgatgtgtatatcacagacaaaactgtgctagacatgaggtctatggacttcaagagcaacagtgctgtggcctggagcaacaaatctgactttgcatgtgcaaacgccttcaacaacagcattattccagaagacaccttcttccccagcccagaaagttcctgtgatgtcaagctggtcgagaaaagctttgaaacagatacgaacctaaactttcaaaacctgtcagtgattgggttccgaatcctcctcctgaaagtggccgggtttaatctgctcatgacgctgcggctgtggtccagcggctccggagccacgaacttctctctgttaaagcaagcaggagacgtggaagaaaaccccggtcccatgggtaccagcctcctctgctggatggccctgtgtctcctgggggcagatcacgcagatactggagtctcccaggaccccagacacaagatcacaaagaggggacagaatgtaactttcaggtgtgatccaatttctgaacacaaccgcctttattggtaccgacagaccctggggcagggcccagagtttctgacttacttccagaatgaagctcaactagaaaaatcaaggctgctcagtgatcggttctctgcagagaggcctaagggatctttctccaccttggagatccagcgcacagagcagggggactcggccatgtatctctgtgccagcagccccctaaagggctccaactatggctacaccttcggttcggggaccaggttaaccgttgtagaggacctgaacaaggtgttcccacccgaggtcgctgtgtttgagccatcagaagcagagatctcccacacccaaaaggccacactggtgtgcctggccacaggcttcttccccgaccacgtggagctgagctggtgggtgaatgggaaggaggtgcacagtggggtcagcacagacccgcagcccctcaaggagcagcccgccctcaatgactccagatactgcctgagcagccgcctgagggtctcggccaccttctggcagaacccccgcaaccacttccgctgtcaagtccagttctacgggctctcggagaatgacgagtggacccaggatagggccaaacccgtcacccagatcgtcagcgccgaggcctggggtagagcagactgtggctttacctcggtgtcctaccagcaaggggtcctgtctgccaccatcctctatgagatcctgctagggaaggccaccctgtatgctgtgctggtcagcgcccttgtgttgatggccatggtcaagagaaaggatttctga

SEQ ID NO: 265 - protein, 605 aa, Artificial Sequence
  TCR sequence
METLLGVSLVILWLQLARVNSQQGEEDPQALSIQEGENATMNCSYKTSINNLQWYRQNSGRGLVHLILIRSNEREKHSGRLRVTLDTSKKSSSLLITASRAADTASYFCATEMNSNYQLIWGAGTKLIIKPDIQNPDPAVYQLRDSKSSDKSVCLFTDFDSQTNVSQSKDSDVYITDKTVLDMRSMDFKSNSAVAWSNKSDFACANAFNNSIIPEDTFFPSPESSCDVKLVEKSFETDTNLNFQNLSVIGFRILLLKVAGFNLLMTLRLWSSGSGATNFSLLKQAGDVEENPGPMGTSLLCWMALCLLGADHADTGVSQDPRHKITKRGQNVTFRCDPISEHNRLYWYRQTLGQGPEFLTYFQNEAQLEKSRLLSDRFSAERPKGSFSTLEIQRTEQGDSAMYLCASSPLKGSNYGYTFGSGTRLTVVEDLNKVFPPEVAVFEPSEAEISHTQKATLVCLATGFFPDHVELSWWVNGKEVHSGVSTDPQPLKEQPALNDSRYCLSSRLRVSATFWQNPRNHFRCQVQFYGLSENDEWTQDRAKPVTQIVSAEAWGRADCGFTSVSYQQGVLSATILYEILLGKATLYAVLVSALVLMAMVKRKDF

SEQ ID NO: 266 - protein, 7 aa, Artificial Sequence
  TCR Valpha CDR-1 sequence
TISGNEY

SEQ ID NO: 267 - protein, 5 aa, Artificial Sequence
  TCR Valpha CDR-2 sequence
GLKNN

SEQ ID NO: 268 - protein, 13 aa, Artificial Sequence
  TCR Valpha CDR-3 sequence
IVRASTSGTYKYI

SEQ ID NO: 269 - protein, 113 aa, Artificial Sequence
  TCR Valpha sequence
DAKTTQPPSMDCAEGRAANLPCNHSTISGNEYVYWYRQIHSQGPQYIIHGLKNNETNEMASLIITEDRKSSTLILPHATLRDTAVYYCIVRASTSGTYKYIFGTGTRLKVLAN

SEQ ID NO: 270 - protein, 130 aa, Artificial Sequence
  TCR Valpha sequence
MRLVARVTVFLTFGTIIDAKTTQPPSMDCAEGRAANLPCNHSTISGNEYVYWYRQIHSQGPQYIIHGLKNNETNEMASLIITEDRKSSTLILPHATLRDTAVYYCIVRASTSGTYKYIFGTGTRLKVLAN

SEQ ID NO: 271 - protein, 270 aa, Artificial Sequence
  TCR alpha chain sequence
MRLVARVTVFLTFGTIIDAKTTQPPSMDCAEGRAANLPCNHSTISGNEYVYWYRQIHSQGPQYIIHGLKNNETNEMASLIITEDRKSSTLILPHATLRDTAVYYCIVRASTSGTYKYIFGTGTRLKVLANIQKPDPAVYQLRDSKSSDKSVCLFTDFDSQTNVSQSKDSDVYITDKTVLDMRSMDFKSNSAVAWSNKSDFACANAFNNSIIPEDTFFPSPESSCDVKLVEKSFETDTNLNFQNLSVIGFRILLLKVAGFNLLMTLRLWSS

SEQ ID NO: 272 - DNA, 390 bp, Artificial Sequence
  TCR Valpha sequence
atgaggctggtggcaagagtaactgtgtttctgacctttggaactataattgatgctaagaccacccagcccccctccatggattgcgctgaaggaagagctgcaaacctgccttgtaatcactctaccatcagtggaaatgagtatgtgtattggtatcgacagattcactcccaggggccacagtatatcattcatggtctaaaaaacaatgaaaccaatgaaatggcctctctgatcatcacagaagacagaaagtccagcaccttgatcctgccccacgctacgctgagagacactgctgtgtactattgcatcgtcagagcgtctacctcaggaacctacaaatacatctttggaacaggcaccaggctgaaggttttagcaaat

SEQ ID NO: 273 - DNA, 810 bp, Artificial Sequence
  TCR alpha chain sequence
atgaggctggtggcaagagtaactgtgtttctgacctttggaactataattgatgctaagaccacccagcccccctccatggattgcgctgaaggaagagctgcaaacctgccttgtaatcactctaccatcagtggaaatgagtatgtgtattggtatcgacagattcactcccaggggccacagtatatcattcatggtctaaaaaacaatgaaaccaatgaaatggcctctctgatcatcacagaagacagaaagtccagcaccttgatcctgccccacgctacgctgagagacactgctgtgtactattgcatcgtcagagcgtctacctcaggaacctacaaatacatctttggaacaggcaccaggctgaaggttttagcaaatatccagaagcctgaccctgccgtgtaccagctgagagactctaaatccagtgacaagtctgtctgcctattcaccgattttgattctcaaacaaatgtgtcacaaagtaaggattctgatgtgtatatcacagacaaaactgtgctagacatgaggtctatggacttcaagagcaacagtgctgtggcctggagcaacaaatctgactttgcatgtgcaaacgccttcaacaacagcattattccagaagacaccttcttccccagcccagaaagttcctgtgatgtcaagctggtcgagaaaagctttgaaacagatacgaacctaaactttcaaaacctgtcagtgattgggttccgaatcctcctcctgaaagtggccgggtttaatctgctcatgacgctgcggctgtggtccagc

SEQ ID NO: 274 - DNA, 402 bp, Artificial Sequence
  TCR Vbeta sequence
atgggtaccagcctcctctgctggatggccctgtgtctcctgggggcagatcacgcagatactggagtctcccaggaccccagacacaagatcacaaagaggggacagaatgtaactttcaggtgtgatccaatttctgaacacaaccgcctttattggtaccgacagaccctggggcagggcccagagtttctgacttacttccagaatgaagctcaactagaaaaatcaaggctgctcagtgatcggttctctgcagagaggcctaagggatctttctccaccttggagatccagcgcacagagcagggggactcggccatgtatctctgtgccagcagtcccgggacagtctacaatgagcagttcttcgggccagggacacggctcaccgtgctagag

SEQ ID NO: 275 - DNA, 939 bp, Artificial Sequence
  TCR beta chain sequence
atgggtaccagcctcctctgctggatggccctgtgtctcctgggggcagatcacgcagatactggagtctcccaggaccccagacacaagatcacaaagaggggacagaatgtaactttcaggtgtgatccaatttctgaacacaaccgcctttattggtaccgacagaccctggggcagggcccagagtttctgacttacttccagaatgaagctcaactagaaaaatcaaggctgctcagtgatcggttctctgcagagaggcctaagggatctttctccaccttggagatccagcgcacagagcagggggactcggccatgtatctctgtgccagcagtcccgggacagtctacaatgagcagttcttcgggccagggacacggctcaccgtgctagaggacctgaaaaacgtgttcccacccgaggtcgctgtgtttgagccatcagaagcagagatctcccacacccaaaaggccacactggtatgcctggccacaggcttctaccccgaccacgtggagctgagctggtgggtgaatgggaaggaggtgcacagtggggtcagcacagacccgcagcccctcaaggagcagcccgccctcaatgactccagatactgcctgagcagccgcctgagggtctcggccaccttctggcagaacccccgcaaccacttccgctgtcaagtccagttctacgggctctcggagaatgacgagtggacccaggatagggccaaacctgtcacccagatcgtcagcgccgaggcctggggtagagcagactgtggcttcacctccgagtcttaccagcaaggggtcctgtctgccaccatcctctatgagatcttgctagggaaggccaccttgtatgccgtgctggtcagtgccctcgtgctgatggccatggtcaagagaaaggattccagaggctag

SEQ ID NO: 276 - protein, 1815 aa, Artificial Sequence
  TCR sequence
ATGAGGCTGGTGGCAAGAGTAACTGTGTTTCTGACCTTTGGAACTATAATTGATGCTAAGACCACCCAGCCCCCCTCCATGGATTGCGCTGAAGGAAGAGCTGCAAACCTGCCTTGTAATCACTCTACCATCAGTGGAAATGAGTATGTGTATTGGTATCGACAGATTCACTCCCAGGGGCCACAGTATATCATTCATGGTCTAAAAAACAATGAAACCAATGAAATGGCCTCTCTGATCATCACAGAAGACAGAAAGTCCAGCACCTTGATCCTGCCCCACGCTACGCTGAGAGACACTGCTGTGTACTATTGCATCGTCAGAGCGTCTACCTCAGGAACCTACAAATACATCTTTGGAACAGGCACCAGGCTGAAGGTTTTAGCAAATATCCAGAAGCCTGACCCTGCCGTGTACCAGCTGAGAGACTCTAAATCCAGTGACAAGTCTGTCTGCCTATTCACCGATTTTGATTCTCAAACAAATGTGTCACAAAGTAAGGATTCTGATGTGTATATCACAGACAAAACTGTGCTAGACATGAGGTCTATGGACTTCAAGAGCAACAGTGCTGTGGCCTGGAGCAACAAATCTGACTTTGCATGTGCAAACGCCTTCAACAACAGCATTATTCCAGAAGACACCTTCTTCCCCAGCCCAGAAAGTTCCTGTGATGTCAAGCTGGTCGAGAAAAGCTTTGAAACAGATACGAACCTAAACTTTCAAAACCTGTCAGTGATTGGGTTCCGAATCCTCCTCCTGAAAGTGGCCGGGTTTAATCTGCTCATGACGCTGCGGCTGTGGTCCAGCGGCTCCGGAGCCACGAACTTCTCTCTGTTAAAGCAAGCAGGAGACGTGGAAGAAAACCCCGGTCCCATGGGTACCAGCCTCCTCTGCTGGATGGCCCTGTGTCTCCTGGGGGCAGATCACGCAGATACTGGAGTCTCCCAGGACCCCAGACACAAGATCACAAAGAGGGGACAGAATGTAACTTTCAGGTGTGATCCAATTTCTGAACACAACCGCCTTTATTGGTACCGACAGACCCTGGGGCAGGGCCCAGAGTTTCTGACTTACTTCCAGAATGAAGCTCAACTAGAAAAATCAAGGCTGCTCAGTGATCGGTTCTCTGCAGAGAGGCCTAAGGGATCTTTCTCCACCTTGGAGATCCAGCGCACAGAGCAGGGGGACTCGGCCATGTATCTCTGTGCCAGCAGTCCCGGGACAGTCTACAATGAGCAGTTCTTCGGGCCAGGGACACGGCTCACCGTGCTAGAGGACCTGAAAAACGTGTTCCCACCCGAGGTCGCTGTGTTTGAGCCATCAGAAGCAGAGATCTCCCACACCCAAAAGGCCACACTGGTATGCCTGGCCACAGGCTTCTACCCCGACCACGTGGAGCTGAGCTGGTGGGTGAATGGGAAGGAGGTGCACAGTGGGGTCAGCACAGACCCGCAGCCCCTCAAGGAGCAGCCCGCCCTCAATGACTCCAGATACTGCCTGAGCAGCCGCCTGAGGGTCTCGGCCACCTTCTGGCAGAACCCCCGCAACCACTTCCGCTGTCAAGTCCAGTTCTACGGGCTCTCGGAGAATGACGAGTGGACCCAGGATAGGGCCAAACCTGTCACCCAGATCGTCAGCGCCGAGGCCTGGGGTAGAGCAGACTGTGGCTTCACCTCCGAGTCTTACCAGCAAGGGGTCCTGTCTGCCACCATCCTCTATGAGATCTTGCTAGGGAAGGCCACCTTGTATGCCGTGCTGGTCAGTGCCCTCGTGCTGATGGCCATGGTCAAGAGAAAGGATTCCAGAGGCTAG

SEQ ID NO: 277 - protein, 604 aa, Artificial Sequence
  TCR sequence
MRLVARVTVFLTFGTIIDAKTTQPPSMDCAEGRAANLPCNHSTISGNEYVYWYRQIHSQGPQYIIHGLKNNETNEMASLIITEDRKSSTLILPHATLRDTAVYYCIVRASTSGTYKYIFGTGTRLKVLANIQKPDPAVYQLRDSKSSDKSVCLFTDFDSQTNVSQSKDSDVYITDKTVLDMRSMDFKSNSAVAWSNKSDFACANAFNNSIIPEDTFFPSPESSCDVKLVEKSFETDTNLNFQNLSVIGFRILLLKVAGFNLLMTLRLWSSGSGATNFSLLKQAGDVEENPGPMGTSLLCWMALCLLGADHADTGVSQDPRHKITKRGQNVTFRCDPISEHNRLYWYRQTLGQGPEFLTYFQNEAQLEKSRLLSDRFSAERPKGSFSTLEIQRTEQGDSAMYLCASSPGTVYNEQFFGPGTRLTVLEDLKNVFPPEVAVFEPSEAEISHTQKATLVCLATGFYPDHVELSWWVNGKEVHSGVSTDPQPLKEQPALNDSRYCLSSRLRVSATFWQNPRNHFRCQVQFYGLSENDEWTQDRAKPVTQIVSAEAWGRADCGFTSESYQQGVLSATILYEILLGKATLYAVLVSALVLMAMVKRKDSRG

SEQ ID NO: 278 - protein, 10 aa, Artificial Sequence
  TCR Valpha CDR-3 sequence
ATPSGNTPLV

SEQ ID NO: 279 - protein, 111 aa, Artificial Sequence
  TCR Valpha sequence
SQQGEEDPQALSIQEGENATMNCSYKTSINNLQWYRQNSGRGLVHLILIRSNEREKHSGRLRVTLDTSKKSSSLLITASRAADTASYFCATPSGNTPLVFGKGTRLSVIAN

SEQ ID NO: 280 - protein, 131 aa, Artificial Sequence
  TCR Valpha sequence
METLLGVSLVILWLQLARVNSQQGEEDPQALSIQEGENATMNCSYKTSINNLQWYRQNSGRGLVHLILIRSNEREKHSGRLRVTLDTSKKSSSLLITASRAADTASYFCATPSGNTPLVFGKGTRLSVIAN

SEQ ID NO: 281 - protein, 271 aa, Artificial Sequence
  TCR alpha chain sequence
METLLGVSLVILWLQLARVNSQQGEEDPQALSIQEGENATMNCSYKTSINNLQWYRQNSGRGLVHLILIRSNEREKHSGRLRVTLDTSKKSSSLLITASRAADTASYFCATPSGNTPLVFGKGTRLSVIANIQNPDPAVYQLRDSKSSDKSVCLFTDFDSQTNVSQSKDSDVYITDKTVLDMRSMDFKSNSAVAWSNKSDFACANAFNNSIIPEDTFFPSPESSCDVKLVEKSFETDTNLNFQNLSVIGFRILLLKVAGFNLLMTLRLWSS

SEQ ID NO: 282 - DNA, 393 bp, Artificial Sequence
  TCR Valpha sequence
atggaaactctcctgggagtgtctttggtgattctatggcttcaactggctagggtgaacagtcaacagggagaagaggatcctcaggccttgagcatccaggagggtgaaaatgccaccatgaactgcagttacaaaactagtataaacaatttacagtggtatagacaaaattcaggtagaggccttgtccacctaattttaatacgttcaaatgaaagagagaaacacagtggaagattaagagtcacgcttgacacttccaagaaaagcagttccttgttgatcacggcttcccgggcagcagacactgcttcttacttctgtgctaccccttcaggaaacacacctcttgtctttggaaagggcacaagactttctgtgattgcaaat

SEQ ID NO: 283 - DNA, 813 bp, Artificial Sequence
  TCR alpha chain sequence
atggaaactctcctgggagtgtctttggtgattctatggcttcaactggctagggtgaacagtcaacagggagaagaggatcctcaggccttgagcatccaggagggtgaaaatgccaccatgaactgcagttacaaaactagtataaacaatttacagtggtatagacaaaattcaggtagaggccttgtccacctaattttaatacgttcaaatgaaagagagaaacacagtggaagattaagagtcacgcttgacacttccaagaaaagcagttccttgttgatcacggcttcccgggcagcagacactgcttcttacttctgtgctaccccttcaggaaacacacctcttgtctttggaaagggcacaagactttctgtgattgcaaatatccagaaccctgaccctgccgtgtaccagctgagagactctaaatccagtgacaagtctgtctgcctattcaccgattttgattctcaaacaaatgtgtcacaaagtaaggattctgatgtgtatatcacagacaaaactgtgctagacatgaggtctatggacttcaagagcaacagtgctgtggcctggagcaacaaatctgactttgcatgtgcaaacgccttcaacaacagcattattccagaagacaccttcttccccagcccagaaagttcctgtgatgtcaagctggtcgagaaaagctttgaaacagatacgaacctaaactttcaaaacctgtcagtgattgggttccgaatcctcctcctgaaagtggccgggtttaatctgctcatgacgctgcggctgtggtccagc

SEQ ID NO: 284 - protein, 12 aa, Artificial Sequence
  TCR Vbeta CDR-3 sequence
ASSQLAGVIEQF

SEQ ID NO: 285 - protein, 115 aa, Artificial Sequence
  TCR Vbeta sequence
DTGVSQDPRHKITKRGQNVTFRCDPISEHNRLYWYRQTLGQGPELLTYFQNEAQLEKSRLLSDRFSAERPKGSFSTLEIQRTEQGDSAMYLCASSQLAGVIEQFFGPGTRLTVLE

SEQ ID NO: 286 - protein, 134 aa, Artificial Sequence
  TCR Vbeta sequence
MGTSLLCWMALCLLGADHADTGVSQDPRHKITKRGQNVTFRCDPISEHNRLYWYRQTLGQGPELLTYFQNEAQLEKSRLLSDRFSAERPKGSFSTLEIQRTEQGDSAMYLCASSQLAGVIEQFFGPGTRLTVLE

SEQ ID NO: 287 - protein, 312 aa, Artificial Sequence
  TCR beta chain sequence
MGTSLLCWMALCLLGADHADTGVSQDPRHKITKRGQNVTFRCDPISEHNRLYWYRQTLGQGPEFLTYFQNEAQLEKSRLLSDRFSAERPKGSFSTLEIQRTEQGDSAMYLCASSQLAGVIEQFFGPGTRLTVLEDLKNVFPPEVAVFEPSEAEISHTQKATLVCLATGFYPDHVELSWWVNGKEVHSGVSTDPQPLKEQPALNDSRYCLSSRLRVSATFWQNPRNHFRCQVQFYGLSENDEWTQDRAKPVTQIVSAEAWGRADCGFTSESYQQGVLSATILYEILLGKATLYAVLVSALVLMAMVKRKDSRG

SEQ ID NO: 288 - DNA, 402 bp, Artificial Sequence
  TCR Vbeta sequence
atgggtaccagcctcctctgctggatggccctgtgtctcctgggggcagatcacgcagatactggagtctcccaggaccccagacacaagatcacaaagaggggacagaatgtaactttcaggtgtgatccaatttctgaacacaaccgcctttattggtaccgacagaccctggggcagggcccagagtttctgacttacttccagaatgaagctcaactagaaaaatcaaggctgctcagtgatcggttctctgcagagaggcctaagggatctttctccaccttggagatccagcgcacagagcagggggactcggccatgtatctctgtgccagctcccaactagcgggagtgattgagcagttcttcgggccagggacacggctcaccgtgctagag

SEQ ID NO: 289 - DNA, 939 bp, Artificial Sequence
  TCR beta chain sequence
atgggtaccagcctcctctgctggatggccctgtgtctcctgggggcagatcacgcagatactggagtctcccaggaccccagacacaagatcacaaagaggggacagaatgtaactttcaggtgtgatccaatttctgaacacaaccgcctttattggtaccgacagaccctggggcagggcccagagtttctgacttacttccagaatgaagctcaactagaaaaatcaaggctgctcagtgatcggttctctgcagagaggcctaagggatctttctccaccttggagatccagcgcacagagcagggggactcggccatgtatctctgtgccagctcccaactagcgggagtgattgagcagttcttcgggccagggacacggctcaccgtgctagaggacctgaaaaacgtgttcccacccgaggtcgctgtgtttgagccatcagaagcagagatctcccacacccaaaaggccacactggtatgcctggccacaggcttctaccccgaccacgtggagctgagctggtgggtgaatgggaaggaggtgcacagtggggtcagcacagacccgcagcccctcaaggagcagcccgccctcaatgactccagatactgcctgagcagccgcctgagggtctcggccaccttctggcagaacccccgcaaccacttccgctgtcaagtccagttctacgggctctcggagaatgacgagtggacccaggatagggccaaacctgtcacccagatcgtcagcgccgaggcctggggtagagcagactgtggcttcacctccgagtcttaccagcaaggggtcctgtctgccaccatcctctatgagatcttgctagggaaggccaccttgtatgccgtgctggtcagtgccctcgtgctgatggccatggtcaagagaaaggattccagaggctag

SEQ ID NO: 290 - DNA, 1818 bp, Artificial Sequence
  TCR sequence
atggaaactctcctgggagtgtctttggtgattctatggcttcaactggctagggtgaacagtcaacagggagaagaggatcctcaggccttgagcatccaggagggtgaaaatgccaccatgaactgcagttacaaaactagtataaacaatttacagtggtatagacaaaattcaggtagaggccttgtccacctaattttaatacgttcaaatgaaagagagaaacacagtggaagattaagagtcacgcttgacacttccaagaaaagcagttccttgttgatcacggcttcccgggcagcagacactgcttcttacttctgtgctaccccttcaggaaacacacctcttgtctttggaaagggcacaagactttctgtgattgcaaatatccagaaccctgaccctgccgtgtaccagctgagagactctaaatccagtgacaagtctgtctgcctattcaccgattttgattctcaaacaaatgtgtcacaaagtaaggattctgatgtgtatatcacagacaaaactgtgctagacatgaggtctatggacttcaagagcaacagtgctgtggcctggagcaacaaatctgactttgcatgtgcaaacgccttcaacaacagcattattccagaagacaccttcttccccagcccagaaagttcctgtgatgtcaagctggtcgagaaaagctttgaaacagatacgaacctaaactttcaaaacctgtcagtgattgggttccgaatcctcctcctgaaagtggccgggtttaatctgctcatgacgctgcggctgtggtccagcggctccggagccacgaacttctctctgttaaagcaagcaggagacgtggaagaaaaccccggtcccatgggtaccagcctcctctgctggatggccctgtgtctcctgggggcagatcacgcagatactggagtctcccaggaccccagacacaagatcacaaagaggggacagaatgtaactttcaggtgtgatccaatttctgaacacaaccgcctttattggtaccgacagaccctggggcagggcccagagtttctgacttacttccagaatgaagctcaactagaaaaatcaaggctgctcagtgatcggttctctgcagagaggcctaagggatctttctccaccttggagatccagcgcacagagcagggggactcggccatgtatctctgtgccagctcccaactagcgggagtgattgagcagttcttcgggccagggacacggctcaccgtgctagaggacctgaaaaacgtgttcccacccgaggtcgctgtgtttgagccatcagaagcagagatctcccacacccaaaaggccacactggtatgcctggccacaggcttctaccccgaccacgtggagctgagctggtgggtgaatgggaaggaggtgcacagtggggtcagcacagacccgcagcccctcaaggagcagcccgccctcaatgactccagatactgcctgagcagccgcctgagggtctcggccaccttctggcagaacccccgcaaccacttccgctgtcaagtccagttctacgggctctcggagaatgacgagtggacccaggatagggccaaacctgtcacccagatcgtcagcgccgaggcctggggtagagcagactgtggcttcacctccgagtcttaccagcaaggggtcctgtctgccaccatcctctatgagatcttgctagggaaggccaccttgtatgccgtgctggtcagtgccctcgtgctgatggccatggtcaagagaaaggattccagaggctag

SEQ ID NO: 291 - protein, 605 aa, Artificial Sequence
  TCR sequence
METLLGVSLVILWLQLARVNSQQGEEDPQALSIQEGENATMNCSYKTSINNLQWYRQNSGRGLVHLILIRSNEREKHSGRLRVTLDTSKKSSSLLITASRAADTASYFCATPSGNTPLVFGKGTRLSVIANIQNPDPAVYQLRDSKSSDKSVCLFTDFDSQTNVSQSKDSDVYITDKTVLDMRSMDFKSNSAVAWSNKSDFACANAFNNSIIPEDTFFPSPESSCDVKLVEKSFETDTNLNFQNLSVIGFRILLLKVAGFNLLMTLRLWSSGSGATNFSLLKQAGDVEENPGPMGTSLLCWMALCLLGADHADTGVSQDPRHKITKRGQNVTFRCDPISEHNRLYWYRQTLGQGPEFLTYFQNEAQLEKSRLLSDRFSAERPKGSFSTLEIQRTEQGDSAMYLCASSQLAGVIEQFFGPGTRLTVLEDLKNVFPPEVAVFEPSEAEISHTQKATLVCLATGFYPDHVELSWWVNGKEVHSGVSTDPQPLKEQPALNDSRYCLSSRLRVSATFWQNPRNHFRCQVQFYGLSENDEWTQDRAKPVTQIVSAEAWGRADCGFTSESYQQGVLSATILYEILLGKATLYAVLVSALVLMAMVKRKDSRG

SEQ ID NO: 292 - protein, 9 aa, Artificial Sequence
  Linker
GGCTCCGGA

SEQ ID NO: 293 - DNA, 422 bp, Homo sapiens
atatccagaaccctgaccctgccgtgtaccagctgagagactctaaatccagtgacaagtctgtctgcctattcaccgattttgattctcaaacaaatgtgtcacaaagtaaggattctgatgtgtatatcacagacaaaactgtgctagacatgaggtctatggacttcaagagcaacagtgctgtggcctggagcaacaaatctgactttgcatgtgcaaacgccttcaacaacagcattattccagaagacaccttcttccccagcccagaaagttcctgtgatgtcaagctggtcgagaaaagctttgaaacagatacgaacctaaactttcaaaacctgtcagtgattgggttccgaatcctcctcctgaaagtggccgggtttaatctgctcatgacgctgcggctgtggtccagc

SEQ ID NO: 294 - protein, 140 aa, Homo sapiens
IQNPDPAVYQLRDSKSSDKSVCLFTDFDSQTNVSQSKDSDVYITDKTVLDMRSMDFKSNSAVAWSNKSDFACANAFNNSIIPEDTFFPSPESSCDVKLVEKSFETDTNLNFQNLSVIGFRILLLKVAGFNLLMTLRLWSS

SEQ ID NO: 295 - DNA, 420 bp, Homo sapiens
atccagaagcctgaccctgccgtgtaccagctgagagactctaaatccagtgacaagtctgtctgcctattcaccgattttgattctcaaacaaatgtgtcacaaagtaaggattctgatgtgtatatcacagacaaaactgtgctagacatgaggtctatggacttcaagagcaacagtgctgtggcctggagcaacaaatctgactttgcatgtgcaaacgccttcaacaacagcattattccagaagacaccttcttccccagcccagaaagttcctgtgatgtcaagctggtcgagaaaagctttgaaacagatacgaacctaaactttcaaaacctgtcagtgattgggttccgaatcctcctcctgaaagtggccgggtttaatctgctcatgacgctgcggctgtggtccagc

SEQ ID NO: 296 - protein, 140 aa, Homo sapiens
IQKPDPAVYQLRDSKSSDKSVCLFTDFDSQTNVSQSKDSDVYITDKTVLDMRSMDFKSNSAVAWSNKSDFACANAFNNSIIPEDTFFPSPESSCDVKLVEKSFETDTNLNFQNLSVIGFRILLLKVAGFNLLMTLRLWSS

SEQ ID NO: 297 - DNA, 531 bp, Homo sapiens
gacctgaacaaggtgttcccacccgaggtcgctgtgtttgagccatcagaagcagagatctcccacacccaaaaggccacactggtgtgcctggccacaggcttcttccccgaccacgtggagctgagctggtgggtgaatgggaaggaggtgcacagtggggtcagcacagacccgcagcccctcaaggagcagcccgccctcaatgactccagatactgcctgagcagccgcctgagggtctcggccaccttctggcagaacccccgcaaccacttccgctgtcaagtccagttctacgggctctcggagaatgacgagtggacccaggatagggccaaacccgtcacccagatcgtcagcgccgaggcctggggtagagcagactgtggctttacctcggtgtcctaccagcaaggggtcctgtctgccaccatcctctatgagatcctgctagggaaggccaccctgtatgctgtgctggtcagcgcccttgtgttgatggccatggtcaagagaaaggatttctga

SEQ ID NO: 298 - protein, 176 aa, Homo sapiens
DLNKVFPPEVAVFEPSEAEISHTQKATLVCLATGFFPDHVELSWWVNGKEVHSGVSTDPQPLKEQPALNDSRYCLSSRLRVSATFWQNPRNHFRCQVQFYGLSENDEWTQDRAKPVTQIVSAEAWGRADCGFTSVSYQQGVLSATILYEILLGKATLYAVLVSALVLMAMVKRKDF

SEQ ID NO: 299 - DNA, 537 bp, Homo sapiens
gacctgaaaaacgtgttcccacccgaggtcgctgtgtttgagccatcagaagcagagatctcccacacccaaaaggccacactggtatgcctggccacaggcttctaccccgaccacgtggagctgagctggtgggtgaatgggaaggaggtgcacagtggggtcagcacagacccgcagcccctcaaggagcagcccgccctcaatgactccagatactgcctgagcagccgcctgagggtctcggccaccttctggcagaacccccgcaaccacttccgctgtcaagtccagttctacgggctctcggagaatgacgagtggacccaggatagggccaaacctgtcacccagatcgtcagcgccgaggcctggggtagagcagactgtggcttcacctccgagtcttaccagcaaggggtcctgtctgccaccatcctctatgagatcttgctagggaaggccaccttgtatgccgtgctggtcagtgccctcgtgctgatggccatggtcaagagaaaggattccagaggctag

SEQ ID NO: 300 - protein, 178 aa, Homo sapiens
DLKNVFPPEVAVFEPSEAEISHTQKATLVCLATGFYPDHVELSWWVNGKEVHSGVSTDPQPLKEQPALNDSRYCLSSRLRVSATFWQNPRNHFRCQVQFYGLSENDEWTQDRAKPVTQIVSAEAWGRADCGFTSESYQQGVLSATILYEILLGKATLYAVLVSALVLMAMVKRKDSRG

SEQ ID NO: 301 - DNA, 816 bp, Artificial Sequence
  TCR Valpha sequence
atggcctctgctcccatctctatgcttgctatgctttttacattaagcggcctgagagcccaatctgttgcccaacctgaagatcaagttaatgttgccgaaggcaatcctctgacagtgaaatgcacctattctgtgtctggcaacccttatcttttttggtatgtgcaataccccaacaggggcctgcagtttttactgaaatacatcacaggcgataacctggtgaagggcagctatggctttgaagctgaattcaacaagagccagacaagcttccacctgaagaaaccttctgcccttgtttctgactctgctttgtacttttgtgctgtgagaggcggatcttacaaatacatctttggaacaggcaccaggctgaaggttttagctaatattcagaaccctgatcctgccgtgtatcagctgagagactctaaaagctctgacaagtctgtgtgcctgttcaccgacttcgactctcagacaaatgtgtctcagtctaaggacagcgatgtgtacatcaccgacaagacagtgcttgacatgaggtctatggacttcaagagcaactctgctgtggcttggagcaacaaatctgactttgcttgtgctaacgccttcaacaacagcattattcctgaagacacctttttccccagccctgaatctagctgtgatgtgaagcttgtggagaaaagctttgagaccgacaccaaccttaacttccagaacctgtctgtgattggattcaggattctgctgcttaaagtggccggcttcaatcttcttatgacccttaggctgtggagcagc

SEQ ID NO: 302 - DNA, 819 bp, Artificial Sequence
  TCR Valpha sequence
atggagacactgctgggagtgtctttggttattctttggcttcaactggctagggttaatagccaacagggagaagaggatcctcaagctttgtctattcaggagggagaaaacgccaccatgaactgcagctacaagacctctatcaacaaccttcagtggtacagacagaattctggaagaggccttgtgcacctgatcttgatcaggagcaatgaaagagagaagcacagcggaagacttagagtgacccttgacaccagcaaaaaaagctctagcctgctgattacagcttctagggctgctgatacagcttcttatttctgtgctacagctcctggatctggaacctacaaatacatctttggaacaggcaccaggctgaaggttttagctaatattcagaatcctgaccctgccgtgtaccaactgagagattctaaaagctctgacaagagcgtgtgcctgttcaccgacttcgactctcaaacaaatgtgtctcagtctaaggacagcgacgtgtacatcaccgacaaaacagtgcttgacatgaggtctatggacttcaagagcaactctgctgttgcctggagcaacaagtctgactttgcttgtgctaacgctttcaacaacagcatcatccctgaagacacattctttcccagccctgaatctagctgtgatgtgaagctggtggagaaaagctttgagaccgacaccaaccttaacttccagaacctttctgtgattggattcaggatcctgctgctgaaagtggctggctttaatcttttgatgacactgaggctgtggagcagc

SEQ ID NO: 303 - DNA, 822 bp, Artificial Sequence
  TCR Valpha sequence
atggagacccttttgggcctgcttatcttgtggcttcaattacagtgggtgagctctaaacaagaagttacccaaattcctgctgccctgtctgttcccgaaggagaaaatttggttctgaactgtagcttcaccgattctgctatttacaacctgcaatggtttaggcaggaccctggcaaaggactgacatctcttttgttgatccagtcttctcagagagagcaaacatctggaagacttaatgccagcctggacaagtcttctggaaggtctacattatacattgccgcttctcaacctggagattctgctacatatttgtgtgctgttaggcctaggacctctggaacatataaatacatctttggcacaggcaccaggctgaaggtgttagctaatatccaaaatcctgatcctgccgtgtaccagctgagagactctaaaagctctgataagagcgtttgcctgttcaccgacttcgacagccagacaaatgtgtctcaatctaaggacagcgatgtgtacatcaccgacaagacagtgcttgacatgaggtctatggacttcaagagcaactctgctgttgcctggagcaacaagtctgactttgcttgtgctaacgctttcaacaacagcatcattcctgaagataccttcttccccagccctgaatctagctgtgatgtgaaactggtggagaaaagctttgagaccgacaccaacctgaacttccaaaacctgtctgtgattggcttcaggatcctgttactgaaagtggctggcttcaatcttttaatgaccctgaggctgtggagcagc

SEQ ID NO: 304 - DNA, 825 bp, Artificial Sequence
  TCR Valpha sequence
atggcctctgcccctattagcatgcttgctatgctttttacattgtctggcctgagagcccaatctgttgctcagcctgaagatcaagttaatgttgccgaaggcaatcctctgacagtgaaatgcacctattctgtgtctggcaacccctatcttttttggtatgttcaataccccaacaggggcctgcagttcttgctgaaatacattacaggcgataatctggtgaagggcagctatggctttgaagctgaatttaacaagagccagaccagcttccaccttaagaaaccttctgcccttgtttctgattctgctttgtacttctgtgctgtgagagctcctacctctggaacctacaagtacatctttggaacaggcaccagactgaaggtgttagctaatattcagaatcctgaccctgccgtttaccagctgagagactctaaaagctctgacaaaagcgtgtgccttttcaccgacttcgacagccagacaaatgtgtctcaatctaaggacagcgatgtgtacatcaccgacaagacagtgcttgacatgaggtctatggatttcaagagcaactctgctgtggcctggagcaataaatctgactttgcttgtgctaacgccttcaacaatagcattattcctgaagacaccttcttccccagccctgaatctagctgtgatgttaaactggtggagaagagctttgagaccgacaccaacctgaacttccagaacttgtctgtgattggctttaggatcttgctgctgaaagttgctggctttaatcttctgatgaccctgaggctgtggagcagc

SEQ ID NO: 305 - DNA, 825 bp, Artificial Sequence
  TCR Valpha sequence
atggcctctgctcctatcagcatgttggccatgttgtttacattgtctggactgagagctcaatctgttgctcaacccgaagatcaggtgaatgttgctgaaggcaatcctctgacagtgaagtgcacctattctgtgtctggaaacccctaccttttttggtatgttcaataccccaacaggggactgcagttccttctgaaatacattacaggcgataacctggtgaagggcagctacggctttgaagctgaattcaataagagccaaaccagcttccatctgaaaaaaccttctgcccttgtgtctgatagcgctctgtatttttgtgctgttagaggccctacatctggcacatacaaatacatctttggaaccggaaccaggctgaaggtgttagctaatattcagaaccctgatcctgctgtgtaccagctgagagactctaaaagctctgacaagtctgtgtgccttttcaccgacttcgacagccagacaaatgtgtctcagtctaaggactctgatgtgtacatcaccgacaagacagtgttagacatgaggtctatggacttcaagagcaactctgctgtggcctggtctaacaagtctgattttgcttgtgctaacgccttcaacaacagcattattcctgaagacaccttcttccctagccctgaatctagctgtgatgtgaagttggtggagaaaagcttcgagaccgacaccaaccttaacttccaaaacctgtctgtgattggcttcaggatcctgcttctgaaagtggctggatttaatctgctgatgacactgaggctgtggagcagc

SEQ ID NO: 306 - DNA, 819 bp, Artificial Sequence
  TCR Valpha sequence
atgaccagcatcagggccgtgttcattttcctgtggttacaactggatcttgtgaatggcgagaatgttgaacaacatccttctacactttctgtgcaggagggagactctgccgtgattaagtgtacatattctgactctgccagcaactacttcccctggtacaagcaggaacttggaaaaagacctcagctgatcatcgacatcaggagcaatgtgggcgaaaagaaagaccaaaggatcgctgtgaccttgaacaagacagccaaacatttcagcctgcacatcacagagacccaacctgaagattctgccgtgtatttctgtgctgctcatttgacaggaggaggcaacaaattgacctttggcacaggaacacagcttaaagtggaactgaacattcagaaccctgaccctgccgtgtaccaattgagagactctaaaagctctgacaagagcgtgtgcctgttcaccgactttgactctcagacaaatgtgtctcagtctaaggacagcgacgtgtacatcaccgacaagacagttcttgacatgaggtctatggacttcaagagcaattctgctgtggcctggagcaacaaatctgactttgcttgtgctaacgctttcaacaacagcatcatccctgaagacacctttttccctagccctgaatctagctgtgatgtgaagctggtggagaaaagctttgagaccgacaccaaccttaacttccaaaacctgtctgtgattggcttcaggatcctgctgcttaaagttgccggctttaacctgttgatgaccttaaggctgtggagcagc

SEQ ID NO: 307 - DNA, 810 bp, Artificial Sequence
  TCR Valpha sequence
atggagacactgctgggagtgtctcttgtgattttatggcttcaactggctagggtgaactctcaacaaggagaagaagatcctcaagccttgagcatccaagaaggagaaaatgccaccatgaactgcagctacaagaccagcatcaacaaccttcagtggtacagacagaattctggaagaggccttgtgcacctgatcttgatcaggagcaatgaaagagagaagcacagcggaagactgagagtgacacttgacaccagcaaaaagagctctagcttgctgattacagctagcagagctgctgacacagcttcttatttttgtgctggaacaggagctaataacctgttctttggcacaggcacaagactgaccgttattccctacattcaaaatcccgatcctgccgtgtaccaactgagagactctaaaagctctgacaaaagcgtgtgcctgttcaccgacttcgactctcagacaaatgtgtctcaatctaaggacagcgacgtgtacatcaccgacaagacagttcttgacatgaggtctatggacttcaagtctaactctgctgtggcctggtctaacaagtctgattttgcttgtgctaacgccttcaacaacagcattattcctgaagataccttcttccccagccctgaatctagctgtgatgtgaaactggtggagaaaagctttgagaccgacaccaacctgaacttccaaaatctgtctgtgattggcttcaggatcctgcttctgaaagtggccggctttaatttgcttatgaccctgaggctgtggtctagc

SEQ ID NO: 308 - DNA, 822 bp, Artificial Sequence
  TCR Valpha sequence
atgaccagcatcagggccgtttttattttcctttggctgcaactggaccttgtgaacggagagaatgttgagcaacatccttctacactgtctgtgcaggaaggagatagcgctgtgatcaagtgtacctattctgactctgccagcaactacttcccttggtacaagcaggagcttggaaaaagacctcagctgatcatcgacatcaggtctaatgtgggcgagaagaaagaccaaaggatcgctgtgacattgaacaagacagctaagcacttcagcctgcatatcacagagacccaacctgaagattctgctgtttatttctgtgctgctcctttagctggaggaggagctgatggattaacctttggaaaaggaacacatctgatcatccaaccctatatccaaaaccctgaccctgccgtgtaccagttaagagactctaaaagctctgacaagagcgtgtgcctgttcaccgacttcgattctcagacaaatgtgtctcagtctaaggacagcgacgtgtacatcaccgacaaaacagtgcttgacatgaggtctatggacttcaaaagcaactctgctgtggcctggagcaacaagtctgattttgcttgtgctaacgctttcaacaacagcatcattcctgaagataccttcttccccagccctgaatctagctgtgatgttaagctggtggagaaaagctttgagaccgacaccaacctgaacttccagaacttgtctgtgattggattcaggatcctgctgctgaaagttgccggctttaatttgttaatgaccctgaggctgtggagcagc

SEQ ID NO: 309 - DNA, 822 bp, Artificial Sequence
  TCR Valpha sequence
atggagaccctgctgggcctgttaatcttatggttgcaattgcaatgggtgtctagcaaacaggaggttacacagattcctgccgctttatctgtgcctgaaggagaaaacttggttctgaactgcagcttcaccgattctgccatttacaatctgcaatggtttaggcaggaccctggcaaaggactgacatctctgttgttgattcagtcttctcagagagagcagacatctggaagacttaatgccagcctggacaaatcttctggaaggagcacactttatatcgctgcttctcaacctggagattctgctacctatctttgtgctgttaggggcacaacatctggaacctacaaatacatctttggaacaggcaccaggctgaaggtgttagctaatattcagaaccctgatcctgctgtgtaccaactgagagactctaagagctctgacaagagcgtttgccttttcaccgacttcgactctcagacaaacgtgtctcagtctaaggactctgatgtgtacatcaccgacaagaccgtgttggacatgaggtctatggactttaagagcaattctgctgtggcctggagcaacaagtctgattttgcttgtgctaacgcctttaacaacagcatcattcctgaagacacctttttccccagccctgaatctagctgtgatgtgaaactggtggagaaatctttcgagaccgacaccaacctgaactttcaaaacctgtctgtgattggcttcaggatcctgctgcttaaagttgccggctttaatctgttaatgaccctgaggctgtggagcagc

SEQ ID NO: 310 - DNA, 825 bp, Artificial Sequence
  TCR Valpha sequence
atgatgaagagcctgagagtgctgctggttattctgtggcttcaattaagctgggtttggagccagcaaaaggaagttgaacaagatcctggacctctttctgttcctgagggagccattgtttctctgaattgcacctacagcaactctgccttccagtacttcatgtggtacagacagtacagcagaaaaggccctgagttgctgatgtacacatacagctctggcaacaaagaagatggcaggtttacagctcaggtggacaaaagcagcaagtacatcagcttgttcatcagagactctcagccctctgattctgccacatatctttgtgctatgagggctacatctggcacctacaagtatatttttggcacaggaaccaggctgaaggtgttagctaatatccaaaatcctgaccctgccgtttaccagctgagagattctaaaagctctgacaagagcgtgtgccttttcaccgacttcgacagccaaacaaatgtgtctcagtctaaggacagcgatgtgtacatcaccgacaagacagtgcttgacatgaggtctatggacttcaagagcaactctgctgtggcttggagcaacaagtctgactttgcttgtgctaacgctttcaacaacagcattattcctgaagacaccttcttccccagccctgaatcttcttgtgatgtgaagttggtggagaagagctttgagaccgacaccaacctgaactttcagaacctgtctgtgattggctttaggattctgctgctgaaagtggctggctttaatttgcttatgaccctgaggctgtggagcagc

SEQ ID NO: 311 - DNA, 807 bp, Artificial Sequence
  TCR Valpha sequence
atgaagctggtgaccagcatcaccgttctgctttctttgggaattatgggagatgccaagaccacacagcctaactctatggagtctaacgaagaagagcctgtgcacttgccttgtaaccacagcacaatctctggaacagactatattcattggtacaggcagcttcccagccaaggacctgagtatgttattcatggacttacaagcaacgtgaacaacagaatggcctctctggctatcgctgaagatagaaagagctctacattgatcctgcacagagctacacttagggatgctgctgtttattattgcatcctgagagccggctctggaacctataaatatattttcggaacaggcaccaggctgaaggttttagctaatattcagaaccctgatcctgccgtttatcagttgagggacagcaaaagctctgacaagtctgtgtgccttttcaccgactttgacagccagaccaatgtgtctcagtctaaggactctgatgtgtacatcaccgacaagacagtgcttgacatgaggtctatggacttcaagagcaactctgctgtggcttggagcaacaaatctgactttgcttgtgctaacgccttcaacaacagcattattcctgaagacaccttctttcccagccctgaatctagctgtgatgtgaaactggtggagaagtctttcgagaccgacaccaaccttaacttccagaacctgtctgtgattggattcaggatcctgctgcttaaagttgccggctttaatctgctgatgaccctgagactgtggagcagc

SEQ ID NO: 312 - DNA, 816 bp, Artificial Sequence
  TCR Valpha sequence
atggagacccttttgggactgcttatcctttggttgcagcttcaatgggttagcagcaagcaagaggttacccaaattcctgctgccttatctgtgcctgaaggagaaaacttggttctgaactgcagcttcacagatagcgccatctataacttacagtggtttaggcaggaccctggcaaaggacttacctctctgttgttgattcagtcttctcagagagagcagacatctggaagacttaatgccagcctggacaaatcttctggaaggagcacattgtacattgctgctagccaacctggagattctgctacctatctgtgtgctgttacaaggacaggagccaacaacctgttttttggcacaggaacaagactgaccgttattccctatatccaaaaccctgaccctgccgtgtatcagcttagagactctaaaagctctgacaagagcgtgtgcctgttcaccgacttcgattctcagacaaatgtgtctcagtctaaggacagcgacgtgtacatcaccgacaaaacagtgcttgacatgaggtctatggacttcaagagcaattctgctgtggcctggagcaacaaatctgactttgcttgtgctaatgccttcaacaacagcatcattcctgaagacaccttcttccctagccctgaatcttcttgtgatgtgaagctggtggagaagagctttgagaccgacaccaaccttaacttccaaaacctgagcgtgatcggatttaggatcctgctgctgaaagttgctggctttaatctgctgatgacccttaggctgtggagcagc

SEQ ID NO: 313 - DNA, 822 bp, Artificial Sequence
  TCR Valpha sequence
atggagacacttcttggccttcttattttgtggcttcagctgcaatgggtgagcagcaaacaggaagttacacaaattcctgctgctctgtctgtgcctgaaggagaaaacttggttctgaactgtagcttcaccgatagcgccatttacaatctgcaatggtttaggcaagaccctggcaaaggactgacctctcttttgctgattcagtcttctcagagagagcagacatctggaagacttaatgccagcctggacaaatcttctggaaggagcaccttatacattgctgcttctcaacccggagattctgctacctatctttgtgctgttagaggatctacctctggcacctacaaatatatcttcggaacaggcaccaggctgaaggttttagctaatatccaaaatcctgaccctgccgtgtaccagctgagagattctaaaagctctgacaaaagcgtgtgcctgttcaccgacttcgacagccaaacaaatgtgtctcaatctaaggacagcgacgtgtacatcaccgacaaaacagtgcttgacatgaggtctatggacttcaaaagcaactctgctgtggcctggagcaacaaatctgactttgcttgtgctaatgccttcaacaacagcattattcctgaagacaccttcttccccagccctgaatctagctgtgatgttaagctggttgagaagagctttgagaccgacaccaacctgaacttccagaacttatctgtgattggcttcaggatcctgcttctgaaagtggccggatttaatttgctgatgaccctgaggctttggagcagc

SEQ ID NO: 314 - DNA, 810 bp, Artificial Sequence
  TCR Valpha sequence
atgaccagcatcagggccgtttttattttcctttggttgcagctggacttggtgaacggagaaaatgttgaacagcatccttctaccctgtctgtgcaagaaggagactctgctgtgatcaagtgtacctactctgactctgccagcaactacttcccttggtacaagcaagagcttggaaagagacctcagctgatcatcgacattaggtctaatgtgggcgagaagaaggaccaaaggatcgctgttacattgaacaagacagccaaacattttagcctgcacattacagagacccaacctgaagacagcgctgtttacttttgtgctgctattgtgggcaaccagttctattttggcacaggcacatctttgaccgtgattcctaatatccaaaaccctgaccctgccgtgtaccaactgagagactctaaatcttctgacaagagcgtgtgcctgttcaccgacttcgactctcaaacaaatgtgtctcagtctaaggacagcgacgtgtacatcaccgacaaaacagtgcttgacatgaggtctatggacttcaagagcaactctgctgtggcttggagcaacaagtctgactttgcttgtgctaatgccttcaacaacagcatcatccctgaagacaccttctttcctagccctgaatctagctgtgatgtgaagctggtggagaagagctttgagacagacaccaaccttaacttccagaacctgagcgtgattggctttaggatcctgttactgaaagttgccggctttaacctgctgatgacccttaggttatggagcagc

SEQ ID NO: 315 - DNA, 810 bp, Artificial Sequence
  TCR Valpha sequence
atgaccagcatcagggctgtttttattttcctgtggctgcagctggatcttgtgaatggagagaatgtggaacaacatccttctaccttaagcgtgcaagagggagatagcgctgtgatcaagtgtacctattctgactctgccagcaactacttcccttggtacaagcaggagcttggaaaaagacctcagctgatcatcgacatcaggtctaatgtgggcgagaagaaagaccaaaggatcgctgtgacattgaacaagacagccaaacatttcagcctgcacatcacagagacccaacctgaagattctgctgtgtacttctgtgctatgagaaataacaatgacatgaggttcggagccggcaccagactgacagttaaacctaatatccaaaaccctgatcctgccgtgtaccagctgagagactctaaatcttctgacaagtctgtgtgcctgttcaccgacttcgacagccaaacaaatgtgtctcagtctaaggacagcgatgtgtacatcaccgacaagacagtgcttgacatgaggtctatggacttcaagagcaactctgctgttgcctggagcaacaaatctgactttgcttgcgctaacgctttcaacaacagcatcatccctgaagataccttcttccctagccctgaatctagctgtgatgtgaagctggtggagaaaagctttgagaccgacaccaaccttaacttccagaacctgtctgtgattggcttcagaatcctgctgctgaaagttgctggcttcaatctgctgatgaccttaaggctgtggagcagc

SEQ ID NO: 316 - DNA, 825 bp, Artificial Sequence
  TCR Valpha sequence
atgctgctgctgctgatccctgtgctgggaatgatttttgccttaagagatgccagagctcagtctgtgagccagcataatcaccatgtgattctgtctgaagctgcttctctggagttgggatgcaactatagctatggaggcacagtgaatctgttctggtatgtgcagtatcctggacaacacctgcagctgctgttaaagtacttctctggagatcctctggttaaaggcatcaagggctttgaggctgagttcatcaagagcaagttcagcttcaacctgagaaagccctctgtgcaatggtctgatacagctgagtatttctgtgctgttagggattctggcgctggatcttaccaactgacattcggaaaaggcaccaaacttagcgtgatccctaatatccaaaatcctgaccctgctgtgtaccagctgagagactctaaaagctctgacaaaagcgtgtgccttttcaccgacttcgacagccagacaaatgtgtctcaatctaaggacagcgatgtgtacatcaccgacaagacagtgcttgacatgaggtctatggacttcaagagcaactctgctgttgcctggagcaacaaatctgattttgcttgcgctaacgccttcaacaacagcatcattcctgaagacaccttcttcccttctcctgagtcttcttgtgatgtgaagctggtggagaagagctttgagaccgacaccaaccttaacttccaaaacctgtctgtgattggcttcaggatccttttgctgaaagtggccggatttaatctgcttatgacacttaggctgtggagcagc

SEQ ID NO: 317 - DNA, 822 bp, Artificial Sequence
  TCR Valpha sequence
atgaccagcatcagggccgtgtttatttttctgtggctgcagttagacttggtgaatggagaaaatgtggagcagcatccctctaccttatctgttcaggaaggagattctgctgtgatcaagtgcacctattctgactctgccagcaactacttcccttggtacaagcaagagctgggaaaaagacctcagctgatcatcgacattaggtctaatgtgggcgagaagaaggaccaaaggatcgctgttacattgaacaagacagctaaacatttcagcctgcacattacagagacccaacctgaagacagcgctgtgtacttttgtgctgcttctaatcctacaggagccaacagcaagctgacctttggaaaaggcattacactgtctgttagacctgatattcagaaccctgaccctgccgtttatcagctgagagactctaaaagctctgacaagagcgtgtgccttttcaccgacttcgactctcagacaaatgtgtctcagtctaaggacagcgatgtgtacatcaccgacaagacagtgcttgacatgaggtctatggatttcaagagcaactctgctgtggcctggagcaacaaatctgactttgcttgtgctaatgccttcaacaacagcatcattcctgaagacaccttcttccctagccctgaatctagctgtgatgttaagctggtggagaagagctttgagaccgacaccaaccttaacttccaaaacctttctgtgattggctttagaatcctgctgctgaaagtggccggatttaatctgcttatgacccttaggctgtggagcagc

SEQ ID NO: 318 - DNA, 816 bp, Artificial Sequence
  TCR Valpha sequence
atggagaccctgctgggcgtgtctttggttattctttggctgcaattagctagagtgaactctcaacaaggagaagaggatcctcaggctttgtctatccaagagggagaaaatgccaccatgaactgcagctacaagaccagcatcaacaaccttcagtggtacagacagaattctggaagaggccttgtgcacctgatcttgatcaggagcaatgaaagagagaagcacagcggaagactgagagtgacacttgacacctctaagaaatcttctagcttgttgattaccgctagcagggccgctgatacagcttcttacttttgtgctacagaaatgaacagcaactaccagttaatctggggcgctggcacaaagctgatcattaagcctgatattcagaatcctgatcctgccgtgtaccagctgagagactctaagtcttctgataagtctgtgtgcctgttcaccgacttcgacagccagacaaatgtgtctcaatctaaggacagcgatgtgtacatcaccgacaagacagtgcttgacatgaggtctatggacttcaagagcaactctgctgttgcctggagcaacaaatctgactttgcttgtgctaacgccttcaataacagcattattcccgaagataccttcttccccagccctgaatctagctgtgatgtgaaactggtggagaaaagctttgagaccgacaccaacctgaacttccagaacctgtctgttattggcttcaggatcctgctgcttaaagttgccggctttaatctgcttatgacccttaggctgtggagcagc

SEQ ID NO: 319 - DNA, 810 bp, Artificial Sequence
  TCR Valpha sequence
atgaggctggtggccagagtgacagtgtttctgacctttggaacaatcattgacgctaaaacaacacaacccccctctatggattgtgctgaaggaagagctgccaatttaccttgcaaccactctaccatctctggcaatgagtatgtgtattggtataggcagattcacagccagggccctcagtacatcattcatggacttaagaacaacgagaccaacgagatggccagcctgattatcacagaagataggaagagctctaccttgatcttacctcacgccacccttagagatacagctgtgtactactgcattgttagagccagcacctctggaacctacaaatacatctttggaacaggcacaaggctgaaggtgttagctaatatccagaatcctgatcctgccgtgtatcagctgagagactctaaaagctctgacaagagcgtttgcctgttcaccgacttcgactctcagacaaatgtgtctcagtctaaggacagcgatgtgtacatcaccgacaagacagtgcttgacatgaggtctatggacttcaagagcaactctgctgttgcctggagcaacaaatctgactttgcctgtgctaatgccttcaacaacagcatcatccctgaagacaccttttttcccagccctgaatctagctgtgatgtgaagctggtggagaaaagctttgagaccgacaccaaccttaacttccagaacctttctgttattggattcaggatcctgctgctgaaagtggccggctttaatctgttgatgacacttaggctgtggagcagc

SEQ ID NO: 320 - DNA, 813 bp, Artificial Sequence
  TCR Valpha sequence
atggagacactgctgggagtgtctttggtgattctttggcttcaacttgctagggtgaactctcaacaaggagaagaggatcctcaagccttgagcatccaagaaggagaaaatgccaccatgaactgcagctacaagaccagcatcaacaaccttcagtggtacagacagaattctggaagaggccttgtgcacctgatcttgatcaggagcaatgaaagagagaagcacagcggaagacttagagtgaccttggacaccagcaaaaaaagctctagcctgctgattacagctagcagagctgctgacacagcttcttatttttgtgctaccccttctggcaatacacctcttgtgtttggaaagggcacaagactttctgtgattgctaatatccagaaccctgatcctgccgtgtatcagctgagagattctaaaagctctgacaagagcgtgtgcctgttcaccgacttcgactctcaaacaaatgtgtctcagtctaaggacagcgacgtgtacatcaccgacaaaacagtgcttgacatgaggtctatggacttcaaaagcaactctgctgtggcctggtctaacaaatctgactttgcttgtgctaacgccttcaacaacagcatcattcctgaagatacctttttccccagccctgaatctagctgtgatgtgaagctggtggaaaaaagctttgagaccgacaccaacctgaacttccagaacctgtctgtgattggattcaggatccttctgctgaaagtggctggctttaatctgctgatgacccttagactgtggagcagc

SEQ ID NO: 321 - DNA, 936 bp, Artificial Sequence
  TCR Vbeta sequence
atgggcacaagcctgctttgctggatggccttatgtttattaggagctgatcacgctgatacaggagtttctcaggatcctaggcacaagatcaccaaaaggggccagaatgtgacattcaggtgtgatcctattagcgaacacaataggctgtattggtacaggcagacattaggccaaggacctgagtttctgacatacttccagaacgaggctcaacttgaaaagtctaggctgctttctgataggttcagcgctgagaggcctaaaggatctttctctaccttggagattcagaggacagaacaaggcgattctgctatgtatctttgtgctagcacccctggaaccgtttataatgagcaatttttcggacctggcacaaggctgaccgtgcttgaagatctgaagaatgtttttcctcctgaagtggccgtttttgagccttctgaagctgagattagccatacacagaaagctacactggtgtgtctggctacaggcttttaccctgatcatgttgaactgtcttggtgggttaatggaaaggaagttcattctggagtgagcacagatccccaaccccttaaagaacaacctgctctgaatgatagcaggtactgtctgagctctaggcttagggtttctgccacattttggcaaaatcccaggaaccactttaggtgccaagtgcagttttacggccttagcgaaaatgacgaatggacccaagacagagctaaacctgtgacccaaattgtttctgctgaagcttggggaagagctgattgtggcttcacaagcgaatcttaccaacaaggcgttctgtctgccaccattctgtacgagatcttgttaggcaaagctacactgtatgctgttctggtttctgccttggttctgatggccatggtgaagagaaaggatagcagaggc

SEQ ID NO: 322 - DNA, 930 bp, Artificial Sequence
  TCR Vbeta sequence
atgggcaccagcttactgtgttggatggccttatgtttattgggagctgatcatgctgatacaggagtgagccaggaccctagacataaaatcaccaaaaggggccagaatgtgaccttcaggtgtgatcctatttctgaacataacaggctgtattggtacaggcaaaccttaggacagggccctgagtttttgacatacttccagaacgaagctcagcttgagaagagcaggttactgtctgatagattctctgctgagaggcctaagggctcttttagcaccttagagatccaaaggacagaacaaggagattctgctatgtatctttgtgctgccccccctgatacctataattctcctctgcattttggcaatggaacaaggctgaccgttacagaggatctgaacaaggtgtttcctcctgaagttgctgtgttcgaacctagcgaagctgagatctctcatacacaaaaggctacactggtgtgtctggctacaggcttctttcccgatcatgttgaattaagctggtgggtgaatggaaaagaagttcactctggagttagcacagatccccaaccccttaaagaacaacctgctctgaacgatagcagatactgccttagctctagacttagggttagcgccaccttttggcaaaatcccagaaaccattttaggtgccaggttcagttctacggcctgtctgaaaatgatgaatggacccaagatagggccaaacctgttacacaaattgtttctgccgaagcttggggaagagctgactgtggatttacatctgttagctatcagcaaggcgtgctgtctgccaccatcctgtatgaaatccttttaggcaaagctaccctgtatgctgtgttagtgtctgccttagtgcttatggccatggtgaagagaaaggacttc

SEQ ID NO: 323 - DNA, 927 bp, Artificial Sequence
  TCR Vbeta sequence
atgggcacaagccttctgtgttggatggctttgtgtttacttggagctgatcacgctgatacaggcgtgtctcaagaccctagacataagattaccaagaggggccagaatgtgacattcaggtgtgatcctatttctgagcataacaggctgtattggtataggcaaacattgggccaaggccctgagttccttacatactttcagaacgaagctcaacttgagaaaagcaggttgttatctgataggttcagcgccgaaaggcctaagggatctttctctacacttgagattcagagaaccgaacaaggcgatagcgctatgtatctgtgtgcctctacagaactgtctggaaacaccatctactttggagagggctcttggctgacagttgttgaggacttaaacaaggtttttcctcccgaggtggctgtgtttgaaccttctgaagctgaaatttctcacacccagaaggctaccttagtttgtcttgccacaggcttttttcccgatcacgttgaattgagctggtgggttaatggcaaggaagtgcattctggagtttctacagatccccagcctcttaaggaacaacctgccttgaacgattctagatactgtctgagctctaggctgagggtttctgctacattttggcaaaatcctaggaaccacttcaggtgccaggtgcagttctacggattaagcgaaaacgatgaatggacacaggacagggctaaacctgttacacaaattgtttctgccgaagcttggggaagagctgattgtggattcacctctgttagctatcagcaaggagtgctgtctgccacaatcctgtatgagatcttacttggcaaagccaccttatatgctgttcttgttagcgcccttgtgttgatggccatggtgaagagaaaggacttc

SEQ ID NO: 324 - DNA, 933 bp, Artificial Sequence
  TCR Vbeta sequence
atgggcaccagcttactttgctggatggctctgtgtttattaggagctgatcatgctgatacaggagtgagccaagatcccaggcataagattacaaagaggggccagaatgtgaccttcaggtgtgaccctatttctgaacacaacagactgtattggtacaggcagacattaggccaaggccctgagtttctgacatatttccagaacgaggctcaacttgagaagtctaggctgttatctgacaggttctctgctgagaggcctaaaggctcttttagcacattggagatccaaagaaccgaacagggcgattctgccatgtatctttgtgcttctagccttgtgtctggcaatgagcaattttttggacctggaacaaggctgaccgtgcttgaagacctgaaaaacgtttttcctcctgaagtggctgtgttcgaaccttctgaagctgagattagccatacccagaaagccacattagtttgtcttgccacaggcttttaccccgatcatgtggaactttcttggtgggttaatggcaaggaggttcattctggagtgtctacagaccctcaacctctgaaagagcaacctgctttgaatgacagcaggtattgtttgtctagcaggctgagggtttctgctacattctggcaaaatcctaggaatcacttcaggtgccaggtgcagttttacggactgagcgaaaatgatgaatggacacaggatagggccaaacctgttacacaaattgtttctgctgaggcttggggaagagctgattgtggattcacaagcgaatcttatcagcaaggcgttctgtctgccaccatcctgtatgagatccttcttggaaaagctaccttatatgctgtgctggtttctgccttggtgcttatggccatggttaagagaaaggacagcagaggc

SEQ ID NO: 325 - DNA, 933 bp, Artificial Sequence
  TCR Vbeta sequence
atgggcacctctcttctttgctggatggctctgtgtttattaggagctgatcacgccgatacaggagtttctcaagatcccaggcacaaaattaccaagaggggccagaacgttacattcaggtgtgatcccatttctgaacacaatagactttattggtacaggcaaaccctgggccaaggccctgaatttctgacatattttcagaacgaggctcaactggagaagtctaggctgctgtctgatagattttctgctgagaggcctaagggctctttctctaccctggaaattcaaaggacagagcaaggagatagcgccatgtatctttgtgctagcagccttgtttctggcaacgagcaattttttggacctggaacaaggctgaccgtgcttgaagacctgaaaaacgtttttcctcctgaggttgctgtgtttgaaccttctgaggctgaaatcagccatacccaaaaggccacattagtttgtctggccacaggcttctatcctgaccatgtggaattatcttggtgggttaacggcaaagaagtgcattctggagtttctacagatcctcagccccttaaagaacagcctgctcttaatgacagcaggtattgcttatcttctaggctgagggtgtctgctacattttggcagaaccctaggaatcattttaggtgccaggtgcagttttacggactgagcgagaatgatgaatggacacaagacagagccaaacccgttacacaaatcgtttctgctgaagcttggggaagagctgattgtggcttcacatctgaatcttatcagcagggagtgttgagcgccaccattctgtacgagattttgcttggaaaagccacattgtatgccgtgttggtttctgctctggtgttgatggctatggtgaagagaaaggacagcagaggc

SEQ ID NO: 326 - DNA, 936 bp, Artificial Sequence
  TCR Vbeta sequence
atgggcacaagcttactgtgttggatggctctttgtttgcttggagctgatcatgctgatacaggagtgtctcaggatcctagacacaagatcacaaagaggggccagaatgtgacattcaggtgtgatcccattagcgaacataacagactttattggtacaggcaaaccctgggccaaggacctgagtttctgacatattttcagaacgaggctcaactggaaaaatctaggcttcttagcgataggttcagcgctgagaggcctaaaggatcttttagcaccttggaaatccaaaggaccgaacaaggcgatagcgccatgtatttatgtgcttcttcttctagggctggaggagaaacacaatattttggacctggcaccaggttgttagtgctggaggacttgaagaatgtttttcctcccgaggtggctgttttcgaaccctctgaagctgaaatttctcatacccagaaggccacattagtgtgcctggctacaggattttaccctgatcatgttgagctttcttggtgggtgaacggaaaagaagttcattctggcgtgagcacagatcctcaacctcttaaagagcaacctgccttgaatgactctaggtattgtttaagctctaggctgagggttagcgccaccttttggcagaatcctagaaatcattttaggtgccaggtgcaattctacggcctgtctgaaaatgacgaatggacacaagacagggctaaacctgtgacacaaattgttagcgctgaagcttggggaagagctgattgtggctttacctctgaaagctatcagcaaggagttctgagcgccaccattctgtatgagatcctgcttggaaaagctacattgtatgccgttcttgtttctgccctggtgttgatggccatggttaagaggaaagatagcagaggc

SEQ ID NO: 327 - DNA, 933 bp, Artificial Sequence
  TCR Vbeta sequence
atgggaaccagcctgctttgttggatggctttatgtcttcttggagctgatcacgctgatacaggagtgtctcaggatcctagacacaaaatcaccaagaggggccagaatgttacattcaggtgtgatcccatttctgagcacaataggctgtactggtataggcaaacacttggacaaggccctgaattcctgacatacttccagaacgaggctcaacttgagaagtctaggctgttatctgataggttctctgctgaaaggcccaaaggatcttttagcaccttggagattcagaggaccgaacaaggagactctgctatgtacctttgcgctagctctttgatcagaggagaaacccagtattttggacctggcacaaggcttctggtgttagaggacttaaaaaacgtgttccctcccgaggttgctgtgttcgaaccttctgaagctgaaatttctcacacccagaaggctacattggtttgtctggccacaggattttatcccgatcatgtggaattaagctggtgggtgaatggcaaagaagttcattctggagttagcacagatccccagcctttaaaggagcaacctgctcttaatgacagcagatactgcctgtcttctaggcttagggtgtctgctacattttggcaaaaccctaggaaccacttcaggtgtcaagtgcagttttacggcctttctgaaaatgatgagtggacccaagacagggccaaacctgttacccaaattgtttctgctgaagcttggggaagagctgactgtggctttacatctgagagctatcaacaaggagtgctgtctgccaccatcctgtacgaaatccttcttggaaaagctaccttatatgccgtgttagtgtctgcccttgtgcttatggccatggtgaagagaaaagatagcagaggc

SEQ ID NO: 328 - DNA, 927 bp, Artificial Sequence
  TCR Vbeta sequence
atgggaaccagcttgttgtgttggatggctctttgtcttttaggagctgaccatgctgatacaggagttagccaagatcccaggcacaaaatcaccaaaaggggccagaatgtgacattcaggtgtgaccctatctctgaacacaataggctttattggtataggcagacactgggccaaggccctgaatttctgacatactttcagaatgaggctcagcttgagaaatctaggttgctgtctgataggttcagcgctgaaaggcctaaaggaagctttagcaccttggagatccaaaggacagaacaaggagatagcgccatgtatctgtgtgcttctagcacaacacttatcacaggatacaccttcggaagcggaacaaggttaaccgttgttgaggatctgaacaaagtgtttcctcctgaggttgctgtgtttgagccctctgaagctgagatttctcatacccagaaagccacattggtttgcttggccacaggcttttttcccgatcatgtggaattgtcttggtgggttaatggcaaagaagtgcactctggagtgtctaccgatcctcaacctcttaaagaacaacctgctctgaacgactctaggtactgcctttcttctaggttgagggtttctgctaccttttggcagaatcccaggaatcatttcaggtgccaggtgcaattctatggactgagcgaaaacgatgaatggacacaggacagagctaaacccgttacacaaattgtttctgctgaggcttggggaagagctgattgtggctttacctctgttagctatcagcaaggagtgctgtctgccacaatcctgtacgaaattctgcttggaaaagccacactgtatgctgttctggtgtctgctcttgtgcttatggctatggtgaagagaaaggacttc

SEQ ID NO: 329 - DNA, 933 bp, Artificial Sequence
  TCR Vbeta sequence
atgggcaccagcctgctttgttggatggctttatgtcttttaggagctgatcacgccgatacaggagtttctcaggaccctagacataagatcacaaagaggggccagaacgtgacattcaggtgtgatcctatttctgagcataacaggctttattggtacaggcagaccttaggccaaggacctgagtttctgacatatttccagaacgaagcccagcttgagaaatctaggttgttgtctgataggttctctgctgagaggcctaagggatctttcagcacattggagattcagagaacagagcaaggcgatagcgccatgtatctgtgtgcttcttcttttcttgctggagagacacaatattttggacctggaacaaggcttctggtgctggaggacctgaaaaatgtttttcctcctgaagtggctgttttcgagccttctgaagctgaaatcagccatacccaaaaagccacactggtgtgtttagccacaggattctatcccgaccatgttgaattgtcttggtgggtgaatggcaaggaagttcactctggagtttctacagatccccaacctcttaaagaacagcctgccttgaatgacagcagatattgcctgagcagcaggttaagagttagcgctaccttttggcaaaatcccagaaaccatttcaggtgccaagtgcagttctacggccttagcgaaaatgatgaatggacacaagatagggccaaacccgttacacaaattgtttctgctgaagcttggggaagagctgattgtggattcacaagcgaaagctatcaacaaggcgtgctgtctgctaccatcctgtatgaaattctgcttggcaaagctacattgtatgctgtgcttgtttctgcccttgtgctgatggctatggtgaagagaaaggatagcagaggc

SEQ ID NO: 330 - DNA, 936 bp, Artificial Sequence
  TCR Vbeta sequence
atgggaacctctctgctgtgttggatggctttgtgtcttttaggagctgatcacgctgatacaggcgttagccaagatcccagacacaaaatcacaaagaggggacagaatgttacattcaggtgtgaccccatctctgaacacaacaggttatattggtacaggcagacattgggccagggacctgagtttttaacatacttccagaacgaagctcaacttgagaaatctaggctgctgtctgataggttctctgccgaaaggcctaaaggaagcttttctaccctggagatccaaagaacagaacaaggcgatagcgctatgtatttgtgtgctgttcctggaggaagcagctacaatgaacaattttttggacccggaaccaggcttaccgttttggaagacctgaaaaatgttttccctcccgaagttgctgtgtttgagccttctgaagctgagatctctcatacacaaaaggccaccttagtttgtctggccacaggattttaccctgatcacgttgaattgtcttggtgggtgaacggaaaagaagttcattctggcgtgtctacagatccccaacctcttaaggaacaacctgccttgaatgacagcagatactgccttagctctagacttagggtgtctgctacattctggcagaatcctaggaaccactttaggtgtcaggttcagttttacggcctgagcgaaaatgatgagtggacacaagatagggccaaacctgttacacaaattgtttctgctgaagcctggggaagagctgactgtggctttacatctgaatcttatcagcaaggagtgctgagcgccaccatcctgtatgaaattttgcttggcaaagctacattgtatgccgtgctggtttctgctcttgtgcttatggccatggtgaaaagaaaggacagcagaggc

SEQ ID NO: 331 - DNA, 936 bp, Artificial Sequence
  TCR Vbeta sequence
atgggcacctctttactttgctggatggctctgtgtttacttggagctgatcatgctgatacaggagtgagccaagatcccagacataagatcacaaagaggggccagaatgtgaccttcaggtgtgaccctatttctgaacacaacagactttattggtataggcagaccttgggacagggccctgaatttttaacctacttccagaacgaagctcaacttgaaaaatctaggctgctgtctgacaggttctctgctgaaaggcctaaaggatcttttagcaccctggaaattcaaaggaccgaacaaggcgatagcgctatgtatttatgtgcttcttctcccggaaccgtgtacaacgaacaattttttggccctggaaccagacttaccgtgcttgaggacctgaaaaatgtttttccccccgaggttgctgtgtttgaaccttctgaagctgaaatctctcatacccagaaggccacacttgtttgtcttgccacaggattctatcctgaccatgtggaactgtcttggtgggttaatggcaaggaagttcactctggagtgtctacagatcctcagcctttaaaagaacagcccgccttgaatgattctaggtactgtcttagctctaggcttagggtgagcgctaccttttggcaaaatcctaggaaccattttaggtgccaggtgcaattctacggccttagcgaaaatgatgagtggacacaagatagggccaaacctgttacacaaattgtttctgctgaagcttggggaagagccgattgtggctttacaagcgaaagctatcaacaaggcgttcttagcgccaccatcctgtatgagatccttcttggaaaagctaccttgtatgccgtgttagtttctgccctggtgttgatggctatggtgaagagaaaggatagcagaggc

SEQ ID NO: 332 - DNA, 930 bp, Artificial Sequence
  TCR Vbeta sequence
atgggcaccagcttactttgttggatggccttatgtttactgggagctgatcacgctgatacaggagttagccaagatcctaggcataagatcaccaagaggggccagaatgtgacattcaggtgtgatcctatctctgaacacaacaggctttattggtataggcaaaccctgggacagggacctgaatttctgacatacttccagaatgaggctcaactggagaaatctagactgctgtctgataggttctctgctgagaggcctaagggatcttttagcacattggaaatccaaaggaccgaacaaggcgacagcgccatgtacttatgtgcttcttctttaggagtgcttggcattggctacacattcggatctggaaccaggttaacagttgtggaggacctgaataaagtgtttcctcctgaggtggctgtttttgagccctctgaggctgaaatttctcatacccaaaaagccacactggtttgcctggctacaggattttttcctgatcatgtggagttaagctggtgggtgaacggaaaagaagttcattctggagtttctaccgatccccagcctctgaaagaacaacctgctctgaatgactctagatactgtctgagctctaggcttagagtgagcgctaccttttggcaaaatcccagaaaccactttaggtgccaagtgcagttctacggcctttctgagaatgatgagtggacacaagatagggccaaacctgtgacacaaattgtttctgctgaagcttggggaagagctgactgtggatttaccagcgtttcttatcaacagggcgttcttagcgctaccatcctttacgagattttactgggcaaagccacactgtatgctgttttagtgagcgctcttgttctgatggccatggtgaagagaaaggacttc

SEQ ID NO: 333 - DNA, 933 bp, Artificial Sequence
  TCR Vbeta sequence
atgggcacctctttgttatgctggatggccctgtgtttattaggagctgatcatgctgacacaggagttagccaagatcctagacacaaaatcaccaagaggggccagaacgttacattcaggtgtgatcccatttctgaacataacaggctgtattggtataggcaaacccttggccaaggccctgaatttctgacatacttccagaatgaggctcaacttgagaaatctagactgctgtctgataggttctctgctgagaggcctaaaggatctttcagcaccttggagatccaaaggacagaacagggagattctgccatgtatctgtgtgccagctctttagttgctggagaaacacaatacttcggacctggaacaaggctgctggtgttagaggacctgaaaaatgtttttcctcccgaggttgctgttttcgagccttctgaagctgaaattagccatacccagaaggccacacttgtttgtcttgccacaggcttttatcctgatcacgtggagttgtcttggtgggttaatggcaaggaagttcatagcggagtttctaccgatcctcagcctttaaaagaacaacccgctctgaacgacagcagatattgcttaagctctaggctgagagtttctgccaccttttggcaaaatcccagaaaccatttcaggtgccaggttcagttctacggattatctgagaatgacgagtggacacaggacagggctaaacctgttacacaaattgtttctgccgaagcttggggaagagctgactgtggatttacatctgaatcttaccaacagggagtgctgagcgccaccatcctgtatgaaatcttacttggaaaagccaccttatatgccgttcttgtgtctgctttagtgctgatggccatggtgaagaggaaagatagcagaggc

SEQ ID NO: 334 - DNA, 933 bp, Artificial Sequence
  TCR Vbeta sequence
atgggcacaagcctgctttgttggatggctctttgtttattaggcgctgatcatgctgatacaggagtgagccaagatcctaggcataagatcacaaagaggggccagaatgtgacattcaggtgtgatcccatctctgaacataataggctgtattggtacaggcaaaccctgggacagggacctgagtttttaacatacttccagaacgaggctcaactggagaaatctaggctgctttctgacaggttttctgctgagaggcccaaaggctctttttctaccctggaaattcagaggacagaacagggagattctgccatgtatctgtgtgctagctctgagacaaccctttctgagcaatttttcggacctggcacaagactgaccgtgttggaagatctgaagaacgtttttcctcccgaagttgccgtgtttgaaccttctgaagccgaaatttctcacacccaaaaggccacccttgtttgtttggctacaggcttttaccctgatcatgttgaacttagctggtgggtgaacggcaaagaagtgcattctggagtttctacagatcctcaacccctgaaggaacaacctgccttaaacgactctaggtactgtctgtctagcagactgagagtttctgccacattttggcaaaaccctaggaaccacttcaggtgccaagtgcaattctatggcttgagcgaaaatgatgaatggacccaagacagagctaagcctgtgacccaaattgtttctgctgaagcttggggaagagctgattgtggctttacaagcgaatcttaccaacagggcgttctgtctgccaccattctgtacgaaatcttgcttggaaaagctaccttgtatgctgtgttagtgtctgccctggtgttgatggctatggtgaagagaaaagatagcagaggc

SEQ ID NO: 335 - DNA, 933 bp, Artificial Sequence
  TCR Vbeta sequence
atgggcacatctctgctttgttggatggctttatgtctgttaggcgctgatcacgccgatacaggagtttctcaagatcctagacacaagatcaccaagaggggccagaacgttacattcaggtgtgatcctatttctgagcataataggctttattggtacaggcagacactgggacaaggccctgaatttctgacatacttccaaaacgaggctcaattagaaaagtctaggctgttgtctgataggttcagcgccgaaaggcctaaaggatctttctctacccttgagatccaaaggacagaacaaggagacagcgccatgtatttatgcgctagcagcttaacaacattggatacccagtattttggccctggaaccagactgacagtgcttgaagatctgaaaaacgtgtttcctcctgaagtggccgtgtttgaaccttctgaagctgagattagccatacccagaaagctacattagtttgcttggccaccggcttttatcccgatcatgttgaattaagctggtgggttaacggcaaagaagtgcattctggagtttctacagatccccaacctcttaaggagcaacctgctttgaatgacagcaggtattgtctttctagcaggctgagggttagcgctacattttggcagaatcctaggaaccatttcaggtgccaagtgcagttctatggccttagcgagaatgatgaatggacacaggacagagctaaacctgttacacaaattgtgtctgccgaagcttggggaagagctgattgtggctttacatctgaaagctaccaacaaggagtgcttagcgccaccatcctgtatgagatccttttaggaaaggctaccttatatgccgtgcttgtgtctgctcttgttctgatggctatggtgaagaggaaagacagcagaggc

SEQ ID NO: 336 - DNA, 936 bp, Artificial Sequence
  TCR Vbeta sequence
atgggaacatctctgctttgttggatggctctttgtctgttaggcgctgatcacgctgatacaggagtttctcaagatcccagacacaagatcaccaagaggggccagaatgttacattcaggtgtgatcccatctctgaacacaatagactttattggtacaggcagaccctgggacaaggccctgagtttcttacatattttcagaacgaggctcagcttgaaaaatctaggttgctgtctgataggttcagcgctgagaggcctaaaggatctttctctaccttggagatccaaagaacagaacaaggcgattctgctatgtacctttgtgctagccttaccggcacagtgtacaacgagcaattttttggacctggaacaagactgaccgtgctggaagatttgaaaaacgttttccctcccgaggttgctgtgtttgagccttctgaagctgaaattagccatacccagaaggctaccctggtttgtttggctacaggcttttatcctgaccatgttgagctgagctggtgggttaatggaaaggaggttcattctggagtttctacagaccctcagcctcttaaagagcaacccgctctgaatgactctagatactgcttgtcttctaggcttagggtttctgccacattttggcagaatcctaggaatcacttcaggtgccaagtgcagttctatggactgtctgaaaatgatgagtggacccaggatagagccaaacctgttacacaaatcgttagcgctgaagcttggggaagagctgattgtggctttacatctgagagctatcagcaaggagtgttatctgccaccatcctgtacgagatccttcttggaaaagccacattgtatgccgtgctggtttctgctctggttttgatggctatggtgaagagaaaggacagcagaggc

SEQ ID NO: 337 - DNA, 927 bp, Artificial Sequence
  TCR Vbeta sequence
atgggcacaagcttactttgttggatggctttgtgtctgttgggagctgatcatgctgatacaggagttagccaagaccctagacacaagatcacaaagaggggccagaatgtgacattcaggtgtgatcccatttctgaacacaataggctgtactggtataggcaaaccttgggacaaggccctgagttcttaacatacttccagaacgaggctcaattagaaaagagcagactgctgtctgacaggttctctgctgaaaggcctaaaggatctttcagcacactggagatccaaagaacagagcagggagattctgccatgtacttatgtgcctctagcttagttaggaacgagaaactgttctttggctctggaacccagctgtctgtgcttgaagatctgaacaaggtttttccccctgaggttgctgtttttgagccttctgaggctgagatttctcatacccaaaaagctacactggtgtgtttggccacaggcttttttcctgaccacgttgaactttcttggtgggtgaatggcaaggaagttcactctggagtttctacagatcctcagcctctgaaggaacaacctgctctgaacgatagcagatactgtcttagcagcagactgagggtttctgctaccttttggcaaaatcctaggaaccacttcagatgccaggtgcaattctacggcctttctgaaaatgacgaatggacccaagatagggccaaacctgttacacagattgtttctgctgaagcttggggaagagctgattgtggcttcacatctgttagctatcagcaaggcgttctttctgccaccatcctgtacgaaatccttcttggaaaagccaccctgtatgctgttctggtttctgcccttgttttgatggctatggtgaagagaaaggacttc

SEQ ID NO: 338 - DNA, 933 bp, Artificial Sequence
  TCR Vbeta sequence
atgggcacctctcttttatgttggatggccctttgcttacttggagctgatcatgctgatacaggagtgtctcaagatcctaggcacaagatcaccaaaaggggccagaatgttacattcaggtgtgatcccatctctgagcataacagactttattggtacaggcagacattaggccagggccctgaattcctgacatactttcaaaacgaggctcaacttgagaagtctagacttctgtctgataggttcagcgctgaaaggcctaagggatctttcagcacacttgagatccaaagaaccgagcaaggagactctgctatgtatttatgcgccagctctcccttaaagggcagcaattatggatataccttcggatctggcaccaggttaaccgttgtggaggacttgaataaagtgttccctcctgaggtggctgtttttgaacctagcgaagctgaaattagccatacccaaaaggctacactggtgtgtctggctacaggcttttttcctgatcatgtggaacttagctggtgggtgaacggaaaagaagtgcattctggagtttctacagatccccaaccccttaaagaacagcctgctctgaacgactctagatactgcttaagcagcagattgagggtttctgccaccttttggcaaaatcccaggaatcacttcaggtgtcaagtgcagttctacggcttgagcgaaaatgatgagtggacacaagatagggctaaacctgtgacacaaattgtttctgccgaagcttggggaagagctgattgtggctttacatctgtgagctatcagcaaggagtgctgtctgccacaatcctgtacgaaatccttcttggaaaagccaccttatatgctgtgctggtgtctgcccttgttttgatggctatggtgaagagaaaggacttc

SEQ ID NO: 339 - DNA, 936 bp, Artificial Sequence
  TCR Vbeta sequence
atgggcaccagcttactgtgttggatggctctttgtttacttggagctgatcacgccgatacaggagttagccaagatcctaggcataagatcacaaagaggggccagaacgttacattcaggtgtgatcccatctctgaacataacaggctttattggtataggcagaccttaggacagggccctgaattcctgacatacttccaaaacgaagctcagcttgagaaatctaggcttctgtctgatagattttctgccgagaggcccaagggatctttctctaccttagaaattcaaaggacagaacaaggagatagcgctatgtatctgtgtgcttcttctcctggcaccgtttataatgagcagtttttcggacctggaacaaggctgaccgtgttggaagacttgaaaaatgttttccctcccgaagtggctgtttttgagccttctgaagctgagatctctcatacccaaaaagccacactggtttgcttagccacaggcttctaccctgatcatgtggaattgtcttggtgggttaatggcaaggaagttcatagcggagtttctacagatccccaaccccttaaagagcaacctgccttgaatgattctaggtactgcttaagcagcagacttagggtgtctgccacattttggcagaatcccagaaaccatttcaggtgccaagtgcagttttatggcctgtctgaaaatgatgagtggacacaagatagagccaaacctgtgacacaaattgtttctgctgaagcttggggaagagccgattgtggatttaccagcgaaagctatcaacaaggcgttctgtctgccaccatcctgtatgaaatcttacttggaaaggccaccttgtatgctgtgttagtgtctgctctggttttgatggctatggtgaagagaaaggacagcagaggc

SEQ ID NO: 340 - DNA, 936 bp, Artificial Sequence
  TCR Vbeta sequence
atgggaacatctctgttgtgttggatggccctgtgtttacttggagctgatcatgctgatacaggagttagccaagaccccagacacaagattacaaagaggggccagaatgtgacattcaggtgtgaccctatctctgaacacaataggctgtattggtataggcaaacactgggacagggccctgagtttcttacatacttccagaatgaagcccaacttgagaagtctaggctgttgtctgacaggttctctgctgaaaggcctaaaggatctttcagcacccttgagattcagaggacagaacaaggagatagcgccatgtatctgtgtgcttcttctcaacttgccggagtgattgaacaattttttggacctggcacaaggcttaccgtgcttgaggatttgaaaaacgttttccctcccgaggttgctgtgtttgaaccttctgaagctgagatctctcatacacagaaggctacattagtgtgccttgccacaggcttttatcctgatcatgttgaacttagctggtgggtgaacggcaaagaagttcattctggagttagcacagatcctcaacctctgaaggaacaacctgctctgaatgattctaggtactgcctgtcttctagactgagggtttctgctaccttttggcagaatcccagaaaccacttcagatgccaagtgcagttctatggactgagcgagaacgatgaatggacacaggatagagccaaacctgttacacaaattgttagcgctgaagcttggggaagggctgattgtggatttacatctgaatcttaccagcagggcgttctgagcgccaccattctgtatgaaattttgcttggaaaggctaccttgtatgccgttcttgtttctgctctggttttgatggccatggtgaagagaaaggacagcagaggc

SEQ ID NO: 341 - protein, 19 aa, Artificial Sequence
  signal sequence
MASAPISMLAMLFTLSGLR

SEQ ID NO: 342 - protein, 20 aa, Artificial Sequence
  signal sequence
METLLGVSLVILWLQLARVN

SEQ ID NO: 343 - protein, 19 aa, Artificial Sequence
  signal sequence
METLLGLLILWLQLQWVSS

SEQ ID NO: 344 - protein, 18 aa, Artificial Sequence
  signal sequence
MSIRAVFIFLWLQLDLVN

SEQ ID NO: 345 - protein, 21 aa, Artificial Sequence
  signal sequence
MKSLRVLLVILWLQLSWVWSQ

SEQ ID NO: 346 - protein, 17 aa, Artificial Sequence
  signal sequence
MKLVTSITVLLSLGIMG

SEQ ID NO: 347 - protein, 18 aa, Artificial Sequence
  signal sequence
MSIRALFIFLWLQLDLVN

SEQ ID NO: 348 - protein, 19 aa, Artificial Sequence
  signal sequence
MLLLLIPVLGMIFALRDAR

SEQ ID NO: 349 - protein, 17 aa, Artificial Sequence
  signal sequence
MRLVARVTVFLTFGTII

SEQ ID NO: 350 - protein, 19 aa, Artificial Sequence
  signal sequence
MGTSLLCWMALCLLGADHA

SEQ ID NO: 351 - DNA, 57 bp, Artificial Sequence
  P2A sequence
gccacgaacttctctctgttaaagcaagcaggagacgtggaagaaaaccccggtccc

SEQ ID NO: 352 - protein, 19 aa, Artificial Sequence
  P2A sequence
ATNFSLLKQAGDVEENPGP

SEQ ID NO: 353 - protein, 3 aa, Artificial Sequence
  linker sequence
GSG

SEQ ID NO: 354 - protein, 9 aa, Artificial Sequence
  HA-1 H variant
VLHDDLLEA

SEQ ID NO: 355 - protein, 9 aa, Artificial Sequence
  HA-1 R variant
VLRDDLLEA

SEQ ID NO: 356 - protein, 173 aa, Homo sapiens
DKQLDADVSPKPTIFLPSIAETKLQKAGTYLCLLEKFFPDVIKIHWQEKKSNTILGSQEGNTMKTNDTYMKFSWLTVPEKSLDKEHRCIVRHENNKNGVDQEIIFPPIKTDVITMDPKDNCSKDANDTLLLQLTNTSAYYMYLLLLLKSVVYFAIITCCLLRRTAFCCNGEKS

SEQ ID NO: 357 - protein, 189 aa, Homo sapiens
DKQLDADVSPKPTIFLPSIAETKLQKAGTYLCLLEKFFPDIIKIHWQEKKSNTILGSQEGNTMKTNDTYMKFSWLTVPEESLDKEHRCIVRHENNKNGIDQEIIFPPIKTDVTTVDPKYNYSKDANDVITMDPKDNWSKDANDTLLLQLTNTSAYYTYLLLLLKSVVYFAIITCCLLRRTAFCCNGEKS

SEQ ID NO: 358 - protein, 153 aa, Homo sapiens
SQPHTKPSVFVMKNGTNVACLVKEFYPKDIRINLVSSKKITEFDPAIVISPSGKYNAVKLGKYEDSNSVTCSVQHDNKTVHSTDFEVKTDSTDHVKPKETENTKQPSKSCHKPKAIVHTEKVNMMSLTVLGLRMLFAKTVAVNFLLTAKLFFL

SEQ ID NO: 359 - protein, 11 aa, Artificial Sequence
  TCR Valpha CDR-3 sequence
AGHSSGTYKYI

SEQ ID NO: 360 - protein, 111 aa, Artificial Sequence
  TCR Valpha sequence
QQVMQIPQYQHVQEGEDFTTYCNSSTTLSNIQWYKQRPGGHPVFLIQLVKSGEVKKQKRLTFQFGEAKKNSSLHITATQTTDVGTYFCAGHSSGTYKYIFGTGTRLKVLAN

SEQ ID NO: 361 - protein, 130 aa, Artificial Sequence
  TCR Valpha sequence
MLLITSMLVLWMQLSQVNGQQVMQIPQYQHVQEGEDFTTYCNSSTTLSNIQWYKQRPGGHPVFLIQLVKSGEVKKQKRLTFQFGEAKKNSSLHITATQTTDVGTYFCAGHSSGTYKYIFGTGTRLKVLAN

SEQ ID NO: 362 - protein, 270 aa, Artificial Sequence
  TCR alpha chain sequence
MLLITSMLVLWMQLSQVNGQQVMQIPQYQHVQEGEDFTTYCNSSTTLSNIQWYKQRPGGHPVFLIQLVKSGEVKKQKRLTFQFGEAKKNSSLHITATQTTDVGTYFCAGHSSGTYKYIFGTGTRLKVLANIQNPDPAVYQLRDSKSSDKSVCLFTDFDSQTNVSQSKDSDVYITDKTVLDMRSMDFKSNSAVAWSNKSDFACANAFNNSIIPEDTFFPSPESSCDVKLVEKSFETDTNLNFQNLSVIGFRILLLKVAGFNLLMTLRLWSS

SEQ ID NO: 363 - protein, 12 aa, Artificial Sequence
  TCR Vbeta CDR-3 sequence
ASSPGTVLNEQF

SEQ ID NO: 364 - protein, 115 aa, Artificial Sequence
  TCR Vbeta sequence
DTGVSQDPRHKITKRGQNVTFRCDPISEHNRLYWYRQTLGQGPEFLTYFQNEAQLEKSRLLSDRFSAERPKGSFSTLEIQRTEQGDSAMYLCASSPGTVLNEQFFGPGTRLTVLE

SEQ ID NO: 365 - protein, 134 aa, Artificial Sequence
  TCR Vbeta sequence
MGTSLLCWMALCLLGADHADTGVSQDPRHKITKRGQNVTFRCDPISEHNRLYWYRQTLGQGPEFLTYFQNEAQLEKSRLLSDRFSAERPKGSFSTLEIQRTEQGDSAMYLCASSPGTVLNEQFFGPGTRLTVLE

SEQ ID NO: 366 - protein, 312 aa, Artificial Sequence
  TCR beta chain sequence
MGTSLLCWMALCLLGADHADTGVSQDPRHKITKRGQNVTFRCDPISEHNRLYWYRQTLGQGPEFLTYFQNEAQLEKSRLLSDRFSAERPKGSFSTLEIQRTEQGDSAMYLCASSPGTVLNEQFFGPGTRLTVLEDLKNVFPPEVAVFEPSEAEISHTQKATLVCLATGFYPDHVELSWWVNGKEVHSGVSTDPQPLKEQPALNDSRYCLSSRLRVSATFWQNPRNHFRCQVQFYGLSENDEWTQDRAKPVTQIVSAEAWGRADCGFTSESYQQGVLSATILYEILLGKATLYAVLVSALVLMAMVKRKDSRG

SEQ ID NO: 367 - protein, 604 aa, Artificial Sequence
  TCR sequence
MLLITSMLVLWMQLSQVNGQQVMQIPQYQHVQEGEDFTTYCNSSTTLSNIQWYKQRPGGHPVFLIQLVKSGEVKKQKRLTFQFGEAKKNSSLHITATQTTDVGTYFCAGHSSGTYKYIFGTGTRLKVLANIQNPDPAVYQLRDSKSSDKSVCLFTDFDSQTNVSQSKDSDVYITDKTVLDMRSMDFKSNSAVAWSNKSDFACANAFNNSIIPEDTFFPSPESSCDVKLVEKSFETDTNLNFQNLSVIGFRILLLKVAGFNLLMTLRLWSSGSGATNFSLLKQAGDVEENPGPMGTSLLCWMALCLLGADHADTGVSQDPRHKITKRGQNVTFRCDPISEHNRLYWYRQTLGQGPEFLTYFQNEAQLEKSRLLSDRFSAERPKGSFSTLEIQRTEQGDSAMYLCASSPGTVLNEQFFGPGTRLTVLEDLKNVFPPEVAVFEPSEAEISHTQKATLVCLATGFYPDHVELSWWVNGKEVHSGVSTDPQPLKEQPALNDSRYCLSSRLRVSATFWQNPRNHFRCQVQFYGLSENDEWTQDRAKPVTQIVSAEAWGRADCGFTSESYQQGVLSATILYEILLGKATLYAVLVSALVLMAMVKRKDSRG

SEQ ID NO: 368 - DNA, 1815 bp, Artificial Sequence
  TCR sequence
atgctactcatcacatcaatgttggtcttatggatgcaattgtcacaggtgaatggacaacaggtaatgcaaattcctcagtaccagcatgtacaagaaggagaggacttcaccacgtactgcaattcctcaactactttaagcaatatacagtggtataagcaaaggcctggtggacatcccgtttttttgatacagttagtgaagagtggagaagtgaagaagcagaaaagactgacatttcagtttggagaagcaaaaaagaacagctccctgcacatcacagccacccagactacagatgtaggaacctacttctgtgcagggcactcctcaggaacctacaaatacatctttggaacaggcaccaggctgaaggttttagcaaatatccagaaccctgaccctgccgtgtaccagctgagagactctaaatccagtgacaagtctgtctgcctattcaccgattttgattctcaaacaaatgtgtcacaaagtaaggattctgatgtgtatatcacagacaaaactgtgctagacatgaggtctatggacttcaagagcaacagtgctgtggcctggagcaacaaatctgactttgcatgtgcaaacgccttcaacaacagcattattccagaagacaccttcttccccagcccagaaagttcctgtgatgtcaagctggtcgagaaaagctttgaaacagatacgaacctaaactttcaaaacctgtcagtgattgggttccgaatcctcctcctgaaagtggccgggtttaatctgctcatgacgctgcggctgtggtccagcggctccggagccacgaacttctctctgttaaagcaagcaggagacgtggaagaaaaccccggtcccatgggcaccagcctcctctgctggatggccctgtgtctcctgggggcagatcacgcagatactggagtctcccaggaccccagacacaagatcacaaagaggggacagaatgtaactttcaggtgtgatccaatttctgaacacaaccgcctttattggtaccgacagaccctggggcagggcccagagtttctgacttacttccagaatgaagctcaactagaaaaatcaaggctgctcagtgatcggttctctgcagagaggcctaagggatctttctccaccttggagatccagcgcacagagcagggggactcggccatgtatctctgtgccagcagccccgggacagttctcaatgagcagttcttcgggccagggacacggctcaccgtgctagaggacctgaaaaacgtgttcccacccgaggtcgctgtgtttgagccatcagaagcagagatctcccacacccaaaaggccacactggtgtgcctggccacaggcttctaccccgaccacgtggagctgagctggtgggtgaatgggaaggaggtgcacagtggggtcagcacagacccgcagcccctcaaggagcagcccgccctcaatgactccagatactgcctgagcagccgcctgagggtctcggccaccttctggcagaacccccgcaaccacttccgctgtcaagtccagttctacgggctctcggagaatgacgagtggacccaggatagggccaaacctgtcacccagatcgtcagcgccgaggcctggggtagagcagactgtggcttcacctccgagtcttaccagcaaggggtcctgtctgccaccatcctctatgagatcttgctagggaaggccaccttgtatgccgtgctggtcagtgccctcgtgctgatggccatggtcaagagaaaggattccagaggctga

SEQ ID NO: 369 - protein, 12 aa, Artificial Sequence
  TCR Valpha CDR-3 sequence
ALYSGAGSYQLT

SEQ ID NO: 370 - protein, 117 aa, Artificial Sequence
  TCR Valpha sequence
MAQTVTQSQPEMSVQEAETVTLSCTYDTSENNYYLFWYKQPPSRQMILVIRQEAYKQQNATENRFSVNFQKAAKSFSLKISDSQLGDTAMYFCALYSGAGSYQLTFGKGTKLSVIPN

SEQ ID NO: 371 - protein, 136 aa, Artificial Sequence
  TCR Valpha sequence
MTRVSLLWAVVVSTCLESGMAQTVTQSQPEMSVQEAETVTLSCTYDTSENNYYLFWYKQPPSRQMILVIRQEAYKQQNATENRFSVNFQKAAKSFSLKISDSQLGDTAMYFCALYSGAGSYQLTFGKGTKLSVIPN

SEQ ID NO: 372 - protein, 276 aa, Artificial Sequence
  TCR alpha chain sequence
MTRVSLLWAVVVSTCLESGMAQTVTQSQPEMSVQEAETVTLSCTYDTSENNYYLFWYKQPPSRQMILVIRQEAYKQQNATENRFSVNFQKAAKSFSLKISDSQLGDTAMYFCALYSGAGSYQLTFGKGTKLSVIPNIQNPDPAVYQLRDSKSSDKSVCLFTDFDSQTNVSQSKDSDVYITDKTVLDMRSMDFKSNSAVAWSNKSDFACANAFNNSIIPEDTFFPSPESSCDVKLVEKSFETDTNLNFQNLSVIGFRILLLKVAGFNLLMTLRLWSS

SEQ ID NO: 373 - protein, 13 aa, Artificial Sequence
  TCR Vbeta CDR-3 sequence
ASSLAAGMNTEAF

SEQ ID NO: 374 - protein, 116 aa, Artificial Sequence
  TCR Vbeta sequence
DTGVSQDPRHKITKRGQNVTFRCDPISEHNRLYWYRQTLGQGPEFLTYFQNEAQLEKSRLLSDRFSAERPKGSFSTLEIQRTEQGDSAMYLCASSLAAGMNTEAFFGQGTRLTVVE

SEQ ID NO: 375 - protein, 135 aa, Artificial Sequence
  TCR Vbeta sequence
MGTSLLCWMALCLLGADHADTGVSQDPRHKITKRGQNVTFRCDPISEHNRLYWYRQTLGQGPEFLTYFQNEAQLEKSRLLSDRFSAERPKGSFSTLEIQRTEQGDSAMYLCASSLAAGMNTEAFFGQGTRLTVVE

SEQ ID NO: 376 - protein, 311 aa, Artificial Sequence
  TCR beta chain sequence
MGTSLLCWMALCLLGADHADTGVSQDPRHKITKRGQNVTFRCDPISEHNRLYWYRQTLGQGPEFLTYFQNEAQLEKSRLLSDRFSAERPKGSFSTLEIQRTEQGDSAMYLCASSLAAGMNTEAFFGQGTRLTVVEDLNKVFPPEVAVFEPSEAEISHTQKATLVCLATGFFPDHVELSWWVNGKEVHSGVSTDPQPLKEQPALNDSRYCLSSRLRVSATFWQNPRNHFRCQVQFYGLSENDEWTQDRAKPVTQIVSAEAWGRADCGFTSVSYQQGVLSATILYEILLGKATLYAVLVSALVLMAMVKRKDF

SEQ ID NO: 377 - protein, 609 aa, Artificial Sequence
  TCR sequence
MTRVSLLWAVVVSTCLESGMAQTVTQSQPEMSVQEAETVTLSCTYDTSENNYYLFWYKQPPSRQMILVIRQEAYKQQNATENRFSVNFQKAAKSFSLKISDSQLGDTAMYFCALYSGAGSYQLTFGKGTKLSVIPNIQNPDPAVYQLRDSKSSDKSVCLFTDFDSQTNVSQSKDSDVYITDKTVLDMRSMDFKSNSAVAWSNKSDFACANAFNNSIIPEDTFFPSPESSCDVKLVEKSFETDTNLNFQNLSVIGFRILLLKVAGFNLLMTLRLWSSGSGATNFSLLKQAGDVEENPGPMGTSLLCWMALCLLGADHADTGVSQDPRHKITKRGQNVTFRCDPISEHNRLYWYRQTLGQGPEFLTYFQNEAQLEKSRLLSDRFSAERPKGSFSTLEIQRTEQGDSAMYLCASSLAAGMNTEAFFGQGTRLTVVEDLNKVFPPEVAVFEPSEAEISHTQKATLVCLATGFFPDHVELSWWVNGKEVHSGVSTDPQPLKEQPALNDSRYCLSSRLRVSATFWQNPRNHFRCQVQFYGLSENDEWTQDRAKPVTQIVSAEAWGRADCGFTSVSYQQGVLSATILYEILLGKATLYAVLVSALVLMAMVKRKDF

SEQ ID NO: 378 - DNA, 1830 bp, Artificial Sequence
  TCR sequence
atgacacgagttagcttgctgtgggcagtcgtggtctccacctgtcttgaatccggcatggcccagacagtcactcagtctcaaccagagatgtctgtgcaggaggcagagactgtgaccctgagttgcacatatgacaccagtgagaataattattatttgttctggtacaagcagcctcccagcaggcagatgattctcgttattcgccaagaagcttataagcaacagaatgcaacggagaatcgtttctctgtgaacttccagaaagcagccaaatccttcagtctcaagatctcagactcacagctgggggacactgcgatgtatttctgtgctttatactctggggctgggagttaccaactcactttcgggaaggggaccaaactctcggtcataccaaatatccagaaccctgaccctgccgtgtaccagctgagagactctaaatccagtgacaagtctgtctgcctattcaccgattttgattctcaaacaaatgtgtcacaaagtaaggattctgatgtgtatatcacagacaaaactgtgctagacatgaggtctatggacttcaagagcaacagtgctgtggcctggagcaacaaatctgactttgcatgtgcaaacgccttcaacaacagcattattccagaagacaccttcttccccagcccagaaagttcctgtgatgtcaagctggtcgagaaaagctttgaaacagatacgaacctaaactttcaaaacctgtcagtgattgggttccgaatcctcctcctgaaagtggccgggtttaatctgctcatgacgctgcggctgtggtccagcggctccggagccacgaacttctctctgttaaagcaagcaggagacgtggaagaaaaccccggtcccatgggcaccagcctcctctgctggatggccctgtgtctcctgggggcagatcacgcagatactggagtctcccaggaccccagacacaagatcacaaagaggggacagaatgtaactttcaggtgtgatccaatttctgaacacaaccgcctttattggtaccgacagaccctggggcagggcccagagtttctgacttacttccagaatgaagctcaactagaaaaatcaaggctgctcagtgatcggttctctgcagagaggcctaagggatctttctccaccttggagatccagcgcacagagcagggggactcggccatgtatctctgtgccagcagcttagcggcagggatgaacactgaagctttctttggacaaggcaccagactcacagttgtagaggacctgaacaaggtgttcccacccgaggtcgctgtgtttgagccatcagaagcagagatctcccacacccaaaaggccacactggtgtgcctggccacaggcttcttccccgaccacgtggagctgagctggtgggtgaatgggaaggaggtgcacagtggggtcagcacggacccgcagcccctcaaggagcagcccgccctcaatgactccagatactgcctgagcagccgcctgagggtctcggccaccttctggcagaacccccgcaaccacttccgctgtcaagtccagttctacgggctctcggagaatgacgagtggacccaggatagggccaaacccgtcacccagatcgtcagcgccgaggcctggggtagagcagactgtggctttacctcggtgtcctaccagcaaggggtcctgtctgccaccatcctctatgagatcctgctagggaaggccaccctgtatgctgtgctggtcagcgcccttgtgttgatggccatggtcaagagaaaggatttctga

SEQ ID NO: 379 - protein, 15 aa, Artificial Sequence
  TCR Valpha CDR-3 sequence
CAVRDPTSGTYKYIF

SEQ ID NO: 380 - protein, 116 aa, Artificial Sequence
  TCR Valpha sequence
AQSVAQPEDQVNVAEGNPLTVKCTYSVSGNPYLFWYVQYPNRGLQFLLKYITGDNLVKGSYGFEAEFNKSQTSFHLKKPSALVSDSALYFCAVRDPTSGTYKYIFGTGTRLKVLAN

SEQ ID NO: 381 - protein, 135 aa, Artificial Sequence
  TCR Valpha sequence
MASAPISMLAMLFTLSGLRAQSVAQPEDQVNVAEGNPLTVKCTYSVSGNPYLFWYVQYPNRGLQFLLKYITGDNLVKGSYGFEAEFNKSQTSFHLKKPSALVSDSALYFCAVRDPTSGTYKYIFGTGTRLKVLAN

SEQ ID NO: 382 - protein, 275 aa, Artificial Sequence
  TCR alpha chain sequence
MASAPISMLAMLFTLSGLRAQSVAQPEDQVNVAEGNPLTVKCTYSVSGNPYLFWYVQYPNRGLQFLLKYITGDNLVKGSYGFEAEFNKSQTSFHLKKPSALVSDSALYFCAVRDPTSGTYKYIFGTGTRLKVLANIQNPDPAVYQLRDSKSSDKSVCLFTDFDSQTNVSQSKDSDVYITDKTVLDMRSMDFKSNSAVAWSNKSDFACANAFNNSIIPEDTFFPSPESSCDVKLVEKSFETDTNLNFQNLSVIGFRILLLKVAGFNLLMTLRLWSS

SEQ ID NO: 383 - protein, 13 aa, Artificial Sequence
  TCR Vbeta CDR-3 sequence
CASSLVQGNEQFF

SEQ ID NO: 384 - protein, 114 aa, Artificial Sequence
  TCR Vbeta sequence
DTGVSQDPRHKITKRGQNVTFRCDPISEHNRLYWYRQTLGQGPEFLTYFQNEAQLEKSRLLSDRFSAERPKGSFSTLEIQRTEQGDSAMYLCASSLVQGNEQFFGPGTRLTVLE

SEQ ID NO: 385 - protein, 133 aa, Artificial Sequence
  TCR Vbeta sequence
MGTSLLCWMALCLLGADHADTGVSQDPRHKITKRGQNVTFRCDPISEHNRLYWYRQTLGQGPEFLTYFQNEAQLEKSRLLSDRFSAERPKGSFSTLEIQRTEQGDSAMYLCASSLVQGNEQFFGPGTRLTVLE

SEQ ID NO: 386 - protein, 311 aa, Artificial Sequence
  TCR beta chain sequence
MGTSLLCWMALCLLGADHADTGVSQDPRHKITKRGQNVTFRCDPISEHNRLYWYRQTLGQGPEFLTYFQNEAQLEKSRLLSDRFSAERPKGSFSTLEIQRTEQGDSAMYLCASSLVQGNEQFFGPGTRLTVLEDLKNVFPPEVAVFEPSEAEISHTQKATLVCLATGFYPDHVELSWWVNGKEVHSGVSTDPQPLKEQPALNDSRYCLSSRLRVSATFWQNPRNHFRCQVQFYGLSENDEWTQDRAKPVTQIVSAEAWGRADCGFTSESYQQGVLSATILYEILLGKATLYAVLVSALVLMAMVKRKDSRG

SEQ ID NO: 387 - protein, 608 aa, Artificial Sequence
  TCR sequence
MASAPISMLAMLFTLSGLRAQSVAQPEDQVNVAEGNPLTVKCTYSVSGNPYLFWYVQYPNRGLQFLLKYITGDNLVKGSYGFEAEFNKSQTSFHLKKPSALVSDSALYFCAVRDPTSGTYKYIFGTGTRLKVLANIQNPDPAVYQLRDSKSSDKSVCLFTDFDSQTNVSQSKDSDVYITDKTVLDMRSMDFKSNSAVAWSNKSDFACANAFNNSIIPEDTFFPSPESSCDVKLVEKSFETDTNLNFQNLSVIGFRILLLKVAGFNLLMTLRLWSSGSGATNFSLLKQAGDVEENPGPMGTSLLCWMALCLLGADHADTGVSQDPRHKITKRGQNVTFRCDPISEHNRLYWYRQTLGQGPEFLTYFQNEAQLEKSRLLSDRFSAERPKGSFSTLEIQRTEQGDSAMYLCASSLVQGNEQFFGPGTRLTVLEDLKNVFPPEVAVFEPSEAEISHTQKATLVCLATGFYPDHVELSWWVNGKEVHSGVSTDPQPLKEQPALNDSRYCLSSRLRVSATFWQNPRNHFRCQVQFYGLSENDEWTQDRAKPVTQIVSAEAWGRADCGFTSESYQQGVLSATILYEILLGKATLYAVLVSALVLMAMVKRKDSRG

SEQ ID NO: 388 - DNA, 1827 bp, Artificial Sequence
  TCR sequence
atggcctctgcacccatctcgatgcttgcgatgctcttcacattgagtgggctgagagctcagtcagtggctcagccggaagatcaggtcaacgttgctgaagggaatcctctgactgtgaaatgcacctattcagtctctggaaacccttatcttttttggtatgttcaataccccaaccgaggcctccagttccttctgaaatacatcacaggggataacctggttaaaggcagctatggctttgaagctgaatttaacaagagccaaacctccttccacctgaagaaaccatctgcccttgtgagcgactccgctttgtacttctgtgctgtgagagaccctacctcaggaacctacaaatacatctttggaacaggcaccaggctgaaggttttagcaaatatccagaaccctgaccctgccgtgtaccagctgagagactctaaatccagtgacaagtctgtctgcctattcaccgattttgattctcaaacaaatgtgtcacaaagtaaggattctgatgtgtatatcacagacaaaactgtgctagacatgaggtctatggacttcaagagcaacagtgctgtggcctggagcaacaaatctgactttgcatgtgcaaacgccttcaacaacagcattattccagaagacaccttcttccccagcccagaaagttcctgtgatgtcaagctggtcgagaaaagctttgaaacagatacgaacctaaactttcaaaacctgtcagtgattgggttccgaatcctcctcctgaaagtggccgggtttaatctgctcatgacgctgcggctgtggtccagcggctccggagccacgaacttctctctgttaaagcaagcaggagacgtggaagaaaaccccggtcccatgggcaccagcctcctctgctggatggccctgtgtctcctgggggcagatcacgcagatactggagtctcccaggaccccagacacaagatcacaaagaggggacagaatgtaactttcaggtgtgatccaatttctgaacacaaccgcctttattggtaccgacagaccctggggcagggcccagagtttctgacttacttccagaatgaagctcaactagaaaaatcaaggctgctcagtgatcggttctctgcagagaggcctaagggatctttctccaccttggagatccagcgcacagagcagggggactcggccatgtatctctgtgccagcagcttagtgcagggcaatgagcagttcttcgggccagggacacggctcaccgtgctagaggacctgaaaaacgtgttcccacccgaggtcgctgtgtttgagccatcagaagcagagatctcccacacccaaaaggccacactggtgtgcctggccacaggcttctaccccgaccacgtggagctgagctggtgggtgaatgggaaggaggtgcacagtggggtcagcacagacccgcagcccctcaaggagcagcccgccctcaatgactccagatactgcctgagcagccgcctgagggtctcggccaccttctggcagaacccccgcaaccacttccgctgtcaagtccagttctacgggctctcggagaatgacgagtggacccaggatagggccaaacctgtcacccagatcgtcagcgccgaggcctggggtagagcagactgtggcttcacctccgagtcttaccagcaaggggtcctgtctgccaccatcctctatgagatcttgctagggaaggccaccttgtatgccgtgctggtcagtgccctcgtgctgatggccatggtcaagagaaaggattccagaggctga

SEQ ID NO: 389 - protein, 11 aa, Artificial Sequence
  TCR Valpha CDR-3 sequence
VVLGGAGNMLT

SEQ ID NO: 390 - protein, 113 aa, Artificial Sequence
  TCR Valpha sequence
GENVEQHPSTLSVQEGDSAVIKCTYSDSASNYFPWYKQELGKRPQLIIDIRSNVGEKKDQRIAVTLNKTAKHFSLHITETQPEDSAVYFCVVLGGAGNMLTFGGGTRLMVKPH

SEQ ID NO: 391 - protein, 132 aa, Artificial Sequence
  TCR Valpha sequence
MTSIRAVFIFLWLQLDLVNGENVEQHPSTLSVQEGDSAVIKCTYSDSASNYFPWYKQELGKRPQLIIDIRSNVGEKKDQRIAVTLNKTAKHFSLHITETQPEDSAVYFCVVLGGAGNMLTFGGGTRLMVKPH

SEQ ID NO: 392 - protein, 272 aa, Artificial Sequence
  TCR alpha chain sequence
MTSIRAVFIFLWLQLDLVNGENVEQHPSTLSVQEGDSAVIKCTYSDSASNYFPWYKQELGKRPQLIIDIRSNVGEKKDQRIAVTLNKTAKHFSLHITETQPEDSAVYFCVVLGGAGNMLTFGGGTRLMVKPHIQNPDPAVYQLRDSKSSDKSVCLFTDFDSQTNVSQSKDSDVYITDKTVLDMRSMDFKSNSAVAWSNKSDFACANAFNNSIIPEDTFFPSPESSCDVKLVEKSFETDTNLNFQNLSVIGFRILLLKVAGFNLLMTLRLWSS

SEQ ID NO: 393 - protein, 11 aa, Artificial Sequence
  TCR Vbeta CDR-3 sequence
ASSLTVSDGYT

SEQ ID NO: 394 - protein, 114 aa, Artificial Sequence
  TCR Vbeta sequence
DTGVSQDPRHKITKRGQNVTFRCDPISEHNRLYWYRQTLGQGPEFLTYFQNEAQLEKSRLLSDRFSAERPKGSFSTLEIQRTEQGDSAMYLCASSLTVSDGYTFGSGTRLTVVE

SEQ ID NO: 395 - protein, 133 aa, Artificial Sequence
  TCR Vbeta sequence
MGTSLLCWMALCLLGADHADTGVSQDPRHKITKRGQNVTFRCDPISEHNRLYWYRQTLGQGPEFLTYFQNEAQLEKSRLLSDRFSAERPKGSFSTLEIQRTEQGDSAMYLCASSLTVSDGYTFGSGTRLTVVE

SEQ ID NO: 396 - protein, 309 aa, Artificial Sequence
  TCR beta chain sequence
MGTSLLCWMALCLLGADHADTGVSQDPRHKITKRGQNVTFRCDPISEHNRLYWYRQTLGQGPEFLTYFQNEAQLEKSRLLSDRFSAERPKGSFSTLEIQRTEQGDSAMYLCASSLTVSDGYTFGSGTRLTVVEDLNKVFPPEVAVFEPSEAEISHTQKATLVCLATGFFPDHVELSWWVNGKEVHSGVSTDPQPLKEQPALNDSRYCLSSRLRVSATFWQNPRNHFRCQVQFYGLSENDEWTQDRAKPVTQIVSAEAWGRADCGFTSVSYQQGVLSATILYEILLGKATLYAVLVSALVLMAMVKRKDF

SEQ ID NO: 397 - protein, 603 aa, Artificial Sequence
  TCR sequence
MTSIRAVFIFLWLQLDLVNGENVEQHPSTLSVQEGDSAVIKCTYSDSASNYFPWYKQELGKRPQLIIDIRSNVGEKKDQRIAVTLNKTAKHFSLHITETQPEDSAVYFCVVLGGAGNMLTFGGGTRLMVKPHIQNPDPAVYQLRDSKSSDKSVCLFTDFDSQTNVSQSKDSDVYITDKTVLDMRSMDFKSNSAVAWSNKSDFACANAFNNSIIPEDTFFPSPESSCDVKLVEKSFETDTNLNFQNLSVIGFRILLLKVAGFNLLMTLRLWSSGSGATNFSLLKQAGDVEENPGPMGTSLLCWMALCLLGADHADTGVSQDPRHKITKRGQNVTFRCDPISEHNRLYWYRQTLGQGPEFLTYFQNEAQLEKSRLLSDRFSAERPKGSFSTLEIQRTEQGDSAMYLCASSLTVSDGYTFGSGTRLTVVEDLNKVFPPEVAVFEPSEAEISHTQKATLVCLATGFFPDHVELSWWVNGKEVHSGVSTDPQPLKEQPALNDSRYCLSSRLRVSATFWQNPRNHFRCQVQFYGLSENDEWTQDRAKPVTQIVSAEAWGRADCGFTSVSYQQGVLSATILYEILLGKATLYAVLVSALVLMAMVKRKDF

SEQ ID NO: 398 - DNA, 1812 bp, Artificial Sequence
  TCR sequence
atgacatccattcgagctgtatttatattcctgtggctgcagctggacttggtgaatggagagaatgtggagcagcatccttcaaccctgagtgtccaggagggagacagcgctgttatcaagtgtacttattcagacagtgcctcaaactacttcccttggtataagcaagaacttggaaaaagacctcagcttattatagacattcgttcaaatgtgggcgaaaagaaagaccaacgaattgctgttacattgaacaagacagccaaacatttctccctgcacatcacagagacccaacctgaagactcggctgtctacttctgtgtcgtgctagggggggcaggcaacatgctcacctttggagggggaacaaggttaatggtcaaaccccatatccagaaccctgaccctgccgtgtaccagctgagagactctaaatccagtgacaagtctgtctgcctattcaccgattttgattctcaaacaaatgtgtcacaaagtaaggattctgatgtgtatatcacagacaaaactgtgctagacatgaggtctatggacttcaagagcaacagtgctgtggcctggagcaacaaatctgactttgcatgtgcaaacgccttcaacaacagcattattccagaagacaccttcttccccagcccagaaagttcctgtgatgtcaagctggtcgagaaaagctttgaaacagatacgaacctaaactttcaaaacctgtcagtgattgggttccgaatcctcctcctgaaagtggccgggtttaatctgctcatgacgctgcggctgtggtccagcggctccggagccacgaacttctctctgttaaagcaagcaggagacgtggaagaaaaccccggtcccatgggcaccagcctcctctgctggatggccctgtgtctcctgggggcagatcacgcagatactggagtctcccaggaccccagacacaagatcacaaagaggggacagaatgtaactttcaggtgtgatccaatttctgaacacaaccgcctttattggtaccgacagaccctggggcagggcccagagtttctgacttacttccagaatgaagctcaactagaaaaatcaaggctgctcagtgatcggttctctgcagagaggcctaagggatctttctccaccttggagatccagcgcacagagcagggggactcggccatgtatctctgtgccagcagcttaacggtgtcagatggctacaccttcggttcggggaccaggttaaccgttgtagaggacctgaacaaggtgttcccacccgaggtcgctgtgtttgagccatcagaagcagagatctcccacacccaaaaggccacactggtgtgcctggccacaggcttcttccccgaccacgtggagctgagctggtgggtgaatgggaaggaggtgcacagtggggtcagcacggacccgcagcccctcaaggagcagcccgccctcaatgactccagatactgcctgagcagccgcctgagggtctcggccaccttctggcagaacccccgcaaccacttccgctgtcaagtccagttctacgggctctcggagaatgacgagtggacccaggatagggccaaacccgtcacccagatcgtcagcgccgaggcctggggtagagcagactgtggctttacctcggtgtcctaccagcaaggggtcctgtctgccaccatcctctatgagatcctgctagggaaggccaccctgtatgctgtgctggtcagcgcccttgtgttgatggccatggtcaagagaaaggatttctga

SEQ ID NO: 399 - protein, 13 aa, Artificial Sequence
  TCR Valpha CDR-3 sequence
ATAYSGGGADGLT

SEQ ID NO: 400 - protein, 115 aa, Artificial Sequence
  TCR Valpha sequence
NSQQGEEDPQALSIQEGENATMNCSYKTSINNLQWYRQNSGRGLVHLILIRSNEREKHSGRLRVTLDTSKKSSSLLITASRAADTASYFCATAYSGGGADGLTFGKGTHLIIQPY

SEQ ID NO: 401 - protein, 134 aa, Artificial Sequence
  TCR Valpha sequence
METLLGVSLVILWLQLARVNSQQGEEDPQALSIQEGENATMNCSYKTSINNLQWYRQNSGRGLVHLILIRSNEREKHSGRLRVTLDTSKKSSSLLITASRAADTASYFCATAYSGGGADGLTFGKGTHLIIQPY

SEQ ID NO: 402 - protein, 274 aa, Artificial Sequence
  TCR alpha chain sequence
METLLGVSLVILWLQLARVNSQQGEEDPQALSIQEGENATMNCSYKTSINNLQWYRQNSGRGLVHLILIRSNEREKHSGRLRVTLDTSKKSSSLLITASRAADTASYFCATAYSGGGADGLTFGKGTHLIIQPYIQNPDPAVYQLRDSKSSDKSVCLFTDFDSQTNVSQSKDSDVYITDKTVLDMRSMDFKSNSAVAWSNKSDFACANAFNNSIIPEDTFFPSPESSCDVKLVEKSFETDTNLNFQNLSVIGFRILLLKVAGFNLLMTLRLWSS

SEQ ID NO: 403 - protein, 10 aa, Artificial Sequence
  TCR Vbeta CDR-3 sequence
ASSLIRAEKL

SEQ ID NO: 404 - protein, 114 aa, Artificial Sequence
  TCR Vbeta sequence
DTGVSQNPRHKITKRGQNVTFRCDPISEHNRLYWYRQTLGQGPEFLTYFQNEAQLEKSRLLSDRFSAERPKGSFSTLEIQRTEQGDSAMYLCASSLIRAEKLFFGSGTQLSVLE

SEQ ID NO: 405 - protein, 133 aa, Artificial Sequence
  TCR Vbeta sequence
MGTSLLCWMALCLLGADHADTGVSQNPRHKITKRGQNVTFRCDPISEHNRLYWYRQTLGQGPEFLTYFQNEAQLEKSRLLSDRFSAERPKGSFSTLEIQRTEQGDSAMYLCASSLIRAEKLFFGSGTQLSVLE

SEQ ID NO: 406 - protein, 309 aa, Artificial Sequence
  TCR beta chain sequence
MGTSLLCWMALCLLGADHADTGVSQNPRHKITKRGQNVTFRCDPISEHNRLYWYRQTLGQGPEFLTYFQNEAQLEKSRLLSDRFSAERPKGSFSTLEIQRTEQGDSAMYLCASSLIRAEKLFFGSGTQLSVLEDLNKVFPPEVAVFEPSEAEISHTQKATLVCLATGFFPDHVELSWWVNGKEVHSGVSTDPQPLKEQPALNDSRYCLSSRLRVSATFWQNPRNHFRCQVQFYGLSENDEWTQDRAKPVTQIVSAEAWGRADCGFTSVSYQQGVLSATILYEILLGKATLYAVLVSALVLMAMVKRKDF

SEQ ID NO: 407 - protein, 605 aa, Artificial Sequence
  TCR sequence
METLLGVSLVILWLQLARVNSQQGEEDPQALSIQEGENATMNCSYKTSINNLQWYRQNSGRGLVHLILIRSNEREKHSGRLRVTLDTSKKSSSLLITASRAADTASYFCATAYSGGGADGLTFGKGTHLIIQPYIQNPDPAVYQLRDSKSSDKSVCLFTDFDSQTNVSQSKDSDVYITDKTVLDMRSMDFKSNSAVAWSNKSDFACANAFNNSIIPEDTFFPSPESSCDVKLVEKSFETDTNLNFQNLSVIGFRILLLKVAGFNLLMTLRLWSSGSGATNFSLLKQAGDVEENPGPMGTSLLCWMALCLLGADHADTGVSQNPRHKITKRGQNVTFRCDPISEHNRLYWYRQTLGQGPEFLTYFQNEAQLEKSRLLSDRFSAERPKGSFSTLEIQRTEQGDSAMYLCASSLIRAEKLFFGSGTQLSVLEDLNKVFPPEVAVFEPSEAEISHTQKATLVCLATGFFPDHVELSWWVNGKEVHSGVSTDPQPLKEQPALNDSRYCLSSRLRVSATFWQNPRNHFRCQVQFYGLSENDEWTQDRAKPVTQIVSAEAWGRADCGFTSVSYQQGVLSATILYEILLGKATLYAVLVSALVLMAMVKRKDF

SEQ ID NO: 408 - DNA, 1818 bp, Artificial Sequence
  TCR sequence
atggaaactctcctgggagtgtctttggtgattctatggcttcaactggctagggtgaacagtcaacagggagaagaggatcctcaggccttgagcatccaggagggtgaaaatgccaccatgaactgcagttacaaaactagtataaacaatttacagtggtatagacaaaattcaggtagaggccttgtccacctaattttaatacgttcaaatgaaagagagaaacacagtggaagattaagagtcacgcttgacacttccaagaaaagcagttccttgttgatcacggcttcccgggcagcagacactgcttcttacttctgtgctacggcgtattcaggaggaggtgctgacggactcacctttggcaaagggactcatctaatcatccagccctatatccagaaccctgaccctgccgtgtaccagctgagagactctaaatccagtgacaagtctgtctgcctattcaccgattttgattctcaaacaaatgtgtcacaaagtaaggattctgatgtgtatatcacagacaaaactgtgctagacatgaggtctatggacttcaagagcaacagtgctgtggcctggagcaacaaatctgactttgcatgtgcaaacgccttcaacaacagcattattccagaagacaccttcttccccagcccagaaagttcctgtgatgtcaagctggtcgagaaaagctttgaaacagatacgaacctaaactttcaaaacctgtcagtgattgggttccgaatcctcctcctgaaagtggccgggtttaatctgctcatgacgctgcggctgtggtccagcggctccggagccacgaacttctctctgttaaagcaagcaggagacgtggaagaaaaccccggtcccatgggcaccagcctcctctgctggatggccctgtgtctcctgggggcagatcacgcagatactggagtctcccagaaccccagacacaagatcacaaagaggggacagaatgtaactttcaggtgtgatccaatttctgaacacaaccgcctttattggtaccgacagaccctggggcagggcccagagtttctgacttacttccagaatgaagctcaactagaaaaatcaaggctgctcagtgatcggttctctgcagagaggcctaagggatctttctccaccttggagatccagcgcacagagcagggggactcggccatgtatctctgtgccagcagcttaattcgtgcggaaaaactgttttttggcagtggaacccagctctctgtcttggaggacctgaacaaggtgttcccacccgaggtcgctgtgtttgagccatcagaagcagagatctcccacacccaaaaggccacactggtgtgcctggccacaggcttcttccccgaccacgtggagctgagctggtgggtgaatgggaaggaggtgcacagtggggtcagcacggacccgcagcccctcaaggagcagcccgccctcaatgactccagatactgcctgagcagccgcctgagggtctcggccaccttctggcagaacccccgcaaccacttccgctgtcaagtccagttctacgggctctcggagaatgacgagtggacccaggatagggccaaacccgtcacccagatcgtcagcgccgaggcctggggtagagcagactgtggctttacctcggtgtcctaccagcaaggggtcctgtctgccaccatcctctatgagatcctgctagggaaggccaccctgtatgctgtgctggtcagcgcccttgtgttgatggccatggtcaagagaaaggatttctag

SEQ ID NO: 409 - protein, 10 aa, Artificial Sequence
  TCR Valpha CDR-3 sequence
AGPKGNTPLV

SEQ ID NO: 410 - protein, 110 aa, Artificial Sequence
  TCR Valpha sequence
QQVMQIPQYQHVQEGEDFTTYCNSSTTLSNIQWYKQRPGGHPVFLIQLVKSGEVKKQKRLTFQFGEAKKNSSLHITATQTTDVGTYFCAGPKGNTPLVFGKGTRLSVIAN

SEQ ID NO: 411 - protein, 129 aa, Artificial Sequence
  TCR Valpha sequence
MLLITSMLVLWMQLSQVNGQQVMQIPQYQHVQEGEDFTTYCNSSTTLSNIQWYKQRPGGHPVFLIQLVKSGEVKKQKRLTFQFGEAKKNSSLHITATQTTDVGTYFCAGPKGNTPLVFGKGTRLSVIAN

SEQ ID NO: 412 - protein, 269 aa, Artificial Sequence
  TCR alpha chain sequence
MLLITSMLVLWMQLSQVNGQQVMQIPQYQHVQEGEDFTTYCNSSTTLSNIQWYKQRPGGHPVFLIQLVKSGEVKKQKRLTFQFGEAKKNSSLHITATQTTDVGTYFCAGPKGNTPLVFGKGTRLSVIANIQNPDPAVYQLRDSKSSDKSVCLFTDFDSQTNVSQSKDSDVYITDKTVLDMRSMDFKSNSAVAWSNKSDFACANAFNNSIIPEDTFFPSPESSCDVKLVEKSFETDTNLNFQNLSVIGFRILLLKVAGFNLLMTLRLWSS

SEQ ID NO: 413 - protein, 11 aa, Artificial Sequence
  TCR Vbeta CDR-3 sequence
ASSLTVSYEQY

SEQ ID NO: 414 - protein, 114 aa, Artificial Sequence
  TCR Vbeta sequence
DTGVSQDPRHKITKRGQNVTFRCDPISEHNRLYWYRQTLGQGPEFLTYFQNEAQLEKSRLLSDRFSAERPKGSFSTLEIQRTEQGDSAMYLCASSLTVSYEQYFGPGTRLTVTE

SEQ ID NO: 415 - protein, 133 aa, Artificial Sequence
  TCR Vbeta sequence
MGTSLLCWMALCLLGADHADTGVSQDPRHKITKRGQNVTFRCDPISEHNRLYWYRQTLGQGPEFLTYFQNEAQLEKSRLLSDRFSAERPKGSFSTLEIQRTEQGDSAMYLCASSLTVSYEQYFGPGTRLTVTE

SEQ ID NO: 416 - protein, 312 aa, Artificial Sequence
  TCR beta chain sequence
MGTSLLCWMALCLLGADHADTGVSQDPRHKITKRGQNVTFRCDPISEHNRLYWYRQTLGQGPEFLTYFQNEAQLEKSRLLSDRFSAERPKGSFSTLEIQRTEQGDSAMYLCASSLTVSYEQYFGPGTRLTVTEDDLKNVFPPEVAVFEPSEAEISHTQKATLVCLATGFYPDHVELSWWVNGKEVHSGVSTDPQPLKEQPALNDSRYCLSSRLRVSATFWQNPRNHFRCQVQFYGLSENDEWTQDRAKPVTQIVSAEAWGRADCGFTSESYQQGVLSATILYEILLGKATLYAVLVSALVLMAMVKRKDSRG

SEQ ID NO: 417 - protein, 602 aa, Artificial Sequence
  TCR sequence
MLLITSMLVLWMQLSQVNGQQVMQIPQYQHVQEGEDFTTYCNSSTTLSNIQWYKQRPGGHPVFLIQLVKSGEVKKQKRLTFQFGEAKKNSSLHITATQTTDVGTYFCAGPKGNTPLVFGKGTRLSVIANIQNPDPAVYQLRDSKSSDKSVCLFTDFDSQTNVSQSKDSDVYITDKTVLDMRSMDFKSNSAVAWSNKSDFACANAFNNSIIPEDTFFPSPESSCDVKLVEKSFETDTNLNFQNLSVIGFRILLLKVAGFNLLMTLRLWSSGSGATNFSLLKQAGDVEENPGPMGTSLLCWMALCLLGADHADTGVSQDPRHKITKRGQNVTFRCDPISEHNRLYWYRQTLGQGPEFLTYFQNEAQLEKSRLLSDRFSAERPKGSFSTLEIQRTEQGDSAMYLCASSLTVSYEQYFGPGTRLTVTEDLKNVFPPEVAVFEPSEAEISHTQKATLVCLATGFYPDHVELSWWVNGKEVHSGVSTDPQPLKEQPALNDSRYCLSSRLRVSATFWQNPRNHFRCQVQFYGLSENDEWTQDRAKPVTQIVSAEAWGRADCGFTSESYQQGVLSATILYEILLGKATLYAVLVSALVLMAMVKRKDSRG

SEQ ID NO: 418 - DNA, 1809 bp, Artificial Sequence
  TCR sequence
atgctactcatcacatcaatgttggtcttatggatgcaattgtcacaggtgaatggacaacaggtaatgcaaattcctcagtaccagcatgtacaagaaggagaggacttcaccacgtactgcaattcctcaactactttaagcaatatacagtggtataagcaaaggcctggtggacatcccgtttttttgatacagttagtgaagagtggagaagtgaagaagcagaaaagactgacatttcagtttggagaagcaaaaaagaacagctccctgcacatcacagccacccagactacagatgtaggaacctacttctgtgcagggccgaaaggaaacacacctcttgtctttggaaagggcacaagactttctgtgattgcaaatatccagaaccctgaccctgccgtgtaccagctgagagactctaaatccagtgacaagtctgtctgcctattcaccgattttgattctcaaacaaatgtgtcacaaagtaaggattctgatgtgtatatcacagacaaaactgtgctagacatgaggtctatggacttcaagagcaacagtgctgtggcctggagcaacaaatctgactttgcatgtgcaaacgccttcaacaacagcattattccagaagacaccttcttccccagcccagaaagttcctgtgatgtcaagctggtcgagaaaagctttgaaacagatacgaacctaaactttcaaaacctgtcagtgattgggttccgaatcctcctcctgaaagtggccgggtttaatctgctcatgacgctgcggctgtggtccagcggctccggagccacgaacttctctctgttaaagcaagcaggagacgtggaagaaaaccccggtcccatgggcaccagcctcctctgctggatggccctgtgtctcctgggggcagatcacgcagatactggagtctcccaggaccccagacacaagatcacaaagaggggacagaatgtaactttcaggtgtgatccaatttctgaacacaaccgcctttattggtaccgacagaccctggggcagggcccagagtttctgacttacttccagaatgaagctcaactagaaaaatcaaggctgctcagtgatcggttctctgcagagaggcctaagggatctttctccaccttggagatccagcgcacagagcagggggactcggccatgtatctctgtgccagcagcttaacagtctcctacgagcagtacttcgggccgggcaccaggctcacggtcacagaggacctgaaaaacgtgttcccacccgaggtcgctgtgtttgagccatcagaagcagagatctcccacacccaaaaggccacactggtgtgcctggccacaggcttctaccccgaccacgtggagctgagctggtgggtgaatgggaaggaggtgcacagtggggtcagcacagacccgcagcccctcaaggagcagcccgccctcaatgactccagatactgcctgagcagccgcctgagggtctcggccaccttctggcagaacccccgcaaccacttccgctgtcaagtccagttctacgggctctcggagaatgacgagtggacccaggatagggccaaacctgtcacccagatcgtcagcgccgaggcctggggtagagcagactgtggcttcacctccgagtcttaccagcaaggggtcctgtctgccaccatcctctatgagatcttgctagggaaggccaccttgtatgccgtgctggtcagtgccctcgtgctgatggccatggtcaagagaaaggattccagaggctga

SEQ ID NO: 419 - protein, 11 aa, Artificial Sequence
  TCR Valpha CDR-3 sequence
AASSPGTYKYI

SEQ ID NO: 420 - protein, 122 aa, Artificial Sequence
  TCR Valpha sequence
SGQQKEKSDQQQVKQSPQSLIVQKGGISIINCAYENTAFDYFPWYQQFPGKGPALLIAIRPDVSEKKEGRFTISFNKSAKQFSLHIMDSQPGDSATYFCAASSPGTYKYIFGTGTRLKVLAN

SEQ ID NO: 421 - protein, 141 aa, Artificial Sequence
  TCR Valpha sequence
MDKILGASFLVLWLQLCWVSGQQKEKSDQQQVKQSPQSLIVQKGGISIINCAYENTAFDYFPWYQQFPGKGPALLIAIRPDVSEKKEGRFTISFNKSAKQFSLHIMDSQPGDSATYFCAASSPGTYKYIFGTGTRLKVLAN

SEQ ID NO: 422 - protein, 281 aa, Artificial Sequence
  TCR alpha chain sequence
MDKILGASFLVLWLQLCWVSGQQKEKSDQQQVKQSPQSLIVQKGGISIINCAYENTAFDYFPWYQQFPGKGPALLIAIRPDVSEKKEGRFTISFNKSAKQFSLHIMDSQPGDSATYFCAASSPGTYKYIFGTGTRLKVLANIQNPDPAVYQLRDSKSSDKSVCLFTDFDSQTNVSQSKDSDVYITDKTVLDMRSMDFKSNSAVAWSNKSDFACANAFNNSIIPEDTFFPSPESSCDVKLVEKSFETDTNLNFQNLSVIGFRILLLKVAGFNLLMTLRLWSS

SEQ ID NO: 423 - protein, 10 aa, Artificial Sequence
  TCR Vbeta CDR-3 sequence
ASSLLKNTEA

SEQ ID NO: 424 - protein, 114 aa, Artificial Sequence
  TCR Vbeta sequence
DTGVSQDPRHKITKRGQNVTFRCDPISEHNRLYWYRQTLGQGPEFLTYFQNEAQLEKSRLLSDRFSAERPKGSFSTLEIQRTEQGDSAMYLCASSLLKNTEAFFGQGTRLTVVE

SEQ ID NO: 425 - protein, 133 aa, Artificial Sequence
  TCR Vbeta sequence
MGTSLLCWMALCLLGADHADTGVSQDPRHKITKRGQNVTFRCDPISEHNRLYWYRQTLGQGPEFLTYFQNEAQLEKSRLLSDRFSAERPKGSFSTLEIQRTEQGDSAMYLCASSLLKNTEAFFGQGTRLTVVE

SEQ ID NO: 426 - protein, 309 aa, Artificial Sequence
  TCR beta chain sequence
MGTSLLCWMALCLLGADHADTGVSQDPRHKITKRGQNVTFRCDPISEHNRLYWYRQTLGQGPEFLTYFQNEAQLEKSRLLSDRFSAERPKGSFSTLEIQRTEQGDSAMYLCASSLLKNTEAFFGQGTRLTVVEDLNKVFPPEVAVFEPSEAEISHTQKATLVCLATGFFPDHVELSWWVNGKEVHSGVSTDPQPLKEQPALNDSRYCLSSRLRVSATFWQNPRNHFRCQVQFYGLSENDEWTQDRAKPVTQIVSAEAWGRADCGFTSVSYQQGVLSATILYEILLGKATLYAVLVSALVLMAMVKRKDF

SEQ ID NO: 427 - protein, 612 aa, Artificial Sequence
  TCR sequence
MDKILGASFLVLWLQLCWVSGQQKEKSDQQQVKQSPQSLIVQKGGISIINCAYENTAFDYFPWYQQFPGKGPALLIAIRPDVSEKKEGRFTISFNKSAKQFSLHIMDSQPGDSATYFCAASSPGTYKYIFGTGTRLKVLANIQNPDPAVYQLRDSKSSDKSVCLFTDFDSQTNVSQSKDSDVYITDKTVLDMRSMDFKSNSAVAWSNKSDFACANAFNNSIIPEDTFFPSPESSCDVKLVEKSFETDTNLNFQNLSVIGFRILLLKVAGFNLLMTLRLWSSGSGATNFSLLKQAGDVEENPGPMGTSLLCWMALCLLGADHADTGVSQDPRHKITKRGQNVTFRCDPISEHNRLYWYRQTLGQGPEFLTYFQNEAQLEKSRLLSDRFSAERPKGSFSTLEIQRTEQGDSAMYLCASSLLKNTEAFFGQGTRLTVVEDLNKVFPPEVAVFEPSEAEISHTQKATLVCLATGFFPDHVELSWWVNGKEVHSGVSTDPQPLKEQPALNDSRYCLSSRLRVSATFWQNPRNHFRCQVQFYGLSENDEWTQDRAKPVTQIVSAEAWGRADCGFTSVSYQQGVLSATILYEILLGKATLYAVLVSALVLMAMVKRKDF

SEQ ID NO: 428 - DNA, 1839 bp, Artificial Sequence
  TCR sequence
atggacaagatcttaggagcatcatttttagttctgtggcttcaactatgctgggtgagtggccaacagaaggagaaaagtgaccagcagcaggtgaaacaaagtcctcaatctttgatagtccagaaaggagggatttcaattataaactgtgcttatgagaacactgcgtttgactactttccatggtaccaacaattccctgggaaaggccctgcattattgatagccatacgtccagatgtgagtgaaaagaaagaaggaagattcacaatctccttcaataaaagtgccaagcagttctcattgcatatcatggattcccagcctggagactcagccacctacttctgtgcagcaagcagcccaggaacctacaaatacatctttggaacaggcaccaggctgaaggttttagcaaatatccagaaccctgaccctgccgtgtaccagctgagagactctaaatccagtgacaagtctgtctgcctattcaccgattttgattctcaaacaaatgtgtcacaaagtaaggattctgatgtgtatatcacagacaaaactgtgctagacatgaggtctatggacttcaagagcaacagtgctgtggcctggagcaacaaatctgactttgcatgtgcaaacgccttcaacaacagcattattccagaagacaccttcttccccagcccagaaagttcctgtgatgtcaagctggtcgagaaaagctttgaaacagatacgaacctaaactttcaaaacctgtcagtgattgggttccgaatcctcctcctgaaagtggccgggtttaatctgctcatgacgctgcggctgtggtccagcggctccggagccacgaacttctctctgttaaagcaagcaggagacgtggaagaaaaccccggtcccatgggcaccagcctcctctgctggatggccctgtgtctcctgggggcagatcacgcagatactggagtctcccaggaccccagacacaagatcacaaagaggggacagaatgtaactttcaggtgtgatccaatttctgaacacaaccgcctttattggtaccgacagaccctggggcagggcccagagtttctgacttacttccagaatgaagctcaactagaaaaatcaaggctgctcagtgatcggttctctgcagagaggcctaagggatctttctccaccttggagatccagcgcacagagcagggggactcggccatgtatctctgtgccagcagcctcttgaagaacactgaagctttctttggacaaggcaccagactcacagttgtagaggacctgaacaaggtgttcccacccgaggtcgctgtgtttgagccatcagaagcagagatctcccacacccaaaaggccacactggtgtgcctggccacaggcttcttccccgaccacgtggagctgagctggtgggtgaatgggaaggaggtgcacagtggggtcagcacggacccgcagcccctcaaggagcagcccgccctcaatgactccagatactgcctgagcagccgcctgagggtctcggccaccttctggcagaacccccgcaaccacttccgctgtcaagtccagttctacgggctctcggagaatgacgagtggacccaggatagggccaaacccgtcacccagatcgtcagcgccgaggcctggggtagagcagactgtggctttacctcggtgtcctaccagcaaggggtcctgtctgccaccatcctctatgagatcctgctagggaaggccaccctgtatgctgtgctggtcagcgcccttgtgttgatggccatggtcaagagaaaggatttctga

SEQ ID NO: 429 - protein, 13 aa, Artificial Sequence
  TCR Valpha CDR-3 sequence
AVRVPTGGYQKVT

SEQ ID NO: 430 - protein, 116 aa, Artificial Sequence
  TCR Valpha sequence
AQSVAQPEDQVNVAEGNPLTVKCTYSVSGNPYLFWYVQYPNRGLQFLLKYITGDNLVKGSYGFEAEFNKSQTSFHLKKPSALVSDSALYFCAVRVPTGGYQKVTFGIGTKLQVIPN

SEQ ID NO: 431 - protein, 135 aa, Artificial Sequence
  TCR Valpha sequence
MASAPISMLAMLFTLSGLRAQSVAQPEDQVNVAEGNPLTVKCTYSVSGNPYLFWYVQYPNRGLQFLLKYITGDNLVKGSYGFEAEFNKSQTSFHLKKPSALVSDSALYFCAVRVPTGGYQKVTFGIGTKLQVIPN

SEQ ID NO: 432 - protein, 275 aa, Artificial Sequence
  TCR alpha chain sequence
MASAPISMLAMLFTLSGLRAQSVAQPEDQVNVAEGNPLTVKCTYSVSGNPYLFWYVQYPNRGLQFLLKYITGDNLVKGSYGFEAEFNKSQTSFHLKKPSALVSDSALYFCAVRVPTGGYQKVTFGIGTKLQVIPNIQNPDPAVYQLRDSKSSDKSVCLFTDFDSQTNVSQSKDSDVYITDKTVLDMRSMDFKSNSAVAWSNKSDFACANAFNNSIIPEDTFFPSPESSCDVKLVEKSFETDTNLNFQNLSVIGFRILLLKVAGFNLLMTLRLWSS

SEQ ID NO: 433 - protein, 9 aa, Artificial Sequence
  TCR Valpha CDR-3 sequence
ASKLTDTQY

SEQ ID NO: 434 - protein, 112 aa, Artificial Sequence
  TCR Vbeta sequence
DTGVSQNPRHKITKRGQNVTFRCDPISEHNRLYWYRQTLGQGPEFLTYFQNEAQLEKSRLLSDRFSAERPKGSFSTLEIQRTEQGDSAMYLCASKLTDTQYFGPGTRLTVLE

SEQ ID NO: 435 - protein, 131 aa, Artificial Sequence
  TCR Vbeta sequence
MGTSLLCWMALCLLGADHADTGVSQNPRHKITKRGQNVTFRCDPISEHNRLYWYRQTLGQGPEFLTYFQNEAQLEKSRLLSDRFSAERPKGSFSTLEIQRTEQGDSAMYLCASKLTDTQYFGPGTRLTVLE

SEQ ID NO: 436 - protein, 309 aa, Artificial Sequence
  TCR beta chain sequence
MGTSLLCWMALCLLGADHADTGVSQNPRHKITKRGQNVTFRCDPISEHNRLYWYRQTLGQGPEFLTYFQNEAQLEKSRLLSDRFSAERPKGSFSTLEIQRTEQGDSAMYLCASKLTDTQYFGPGTRLTVLEDLKNVFPPEVAVFEPSEAEISHTQKATLVCLATGFYPDHVELSWWVNGKEVHSGVSTDPQPLKEQPALNDSRYCLSSRLRVSATFWQNPRNHFRCQVQFYGLSENDEWTQDRAKPVTQIVSAEAWGRADCGFTSESYQQGVLSATILYEILLGKATLYAVLVSALVLMAMVKRKDSRG

SEQ ID NO: 437 - protein, 606 aa, Artificial Sequence
  TCR sequence
MASAPISMLAMLFTLSGLRAQSVAQPEDQVNVAEGNPLTVKCTYSVSGNPYLFWYVQYPNRGLQFLLKYITGDNLVKGSYGFEAEFNKSQTSFHLKKPSALVSDSALYFCAVRVPTGGYQKVTFGIGTKLQVIPNIQNPDPAVYQLRDSKSSDKSVCLFTDFDSQTNVSQSKDSDVYITDKTVLDMRSMDFKSNSAVAWSNKSDFACANAFNNSIIPEDTFFPSPESSCDVKLVEKSFETDTNLNFQNLSVIGFRILLLKVAGFNLLMTLRLWSSGSGATNFSLLKQAGDVEENPGPMGTSLLCWMALCLLGADHADTGVSQNPRHKITKRGQNVTFRCDPISEHNRLYWYRQTLGQGPEFLTYFQNEAQLEKSRLLSDRFSAERPKGSFSTLEIQRTEQGDSAMYLCASKLTDTQYFGPGTRLTVLEDLKNVFPPEVAVFEPSEAEISHTQKATLVCLATGFYPDHVELSWWVNGKEVHSGVSTDPQPLKEQPALNDSRYCLSSRLRVSATFWQNPRNHFRCQVQFYGLSENDEWTQDRAKPVTQIVSAEAWGRADCGFTSESYQQGVLSATILYEILLGKATLYAVLVSALVLMAMVKRKDSRG

SEQ ID NO: 438 - DNA, 1821 bp, Artificial Sequence
  TCR sequence
atggcctctgcacccatctcgatgcttgcgatgctcttcacattgagtgggctgagagctcagtcagtggctcagccggaagatcaggtcaacgttgctgaagggaatcctctgactgtgaaatgcacctattcagtctctggaaacccttatcttttttggtatgttcaataccccaaccgaggcctccagttccttctgaaatacatcacaggggataacctggttaaaggcagctatggctttgaagctgaatttaacaagagccaaacctccttccacctgaagaaaccatctgcccttgtgagcgactccgctttgtacttctgtgctgtgagagtcccgactgggggttaccagaaagttacctttggaattggaacaaagctccaagtcatcccaaatatccagaaccctgaccctgccgtgtaccagctgagagactctaaatccagtgacaagtctgtctgcctattcaccgattttgattctcaaacaaatgtgtcacaaagtaaggattctgatgtgtatatcacagacaaaactgtgctagacatgaggtctatggacttcaagagcaacagtgctgtggcctggagcaacaaatctgactttgcatgtgcaaacgccttcaacaacagcattattccagaagacaccttcttccccagcccagaaagttcctgtgatgtcaagctggtcgagaaaagctttgaaacagatacgaacctaaactttcaaaacctgtcagtgattgggttccgaatcctcctcctgaaagtggccgggtttaatctgctcatgacgctgcggctgtggtccagcggctccggagccacgaacttctctctgttaaagcaagcaggagacgtggaagaaaaccccggtcccatgggcaccagcctcctctgctggatggccctgtgtctcctgggggcagatcacgcagatactggagtctcccagaaccccagacacaagatcacaaagaggggacagaatgtaactttcaggtgtgatccaatttctgaacacaaccgcctttattggtaccgacagaccctggggcagggcccagagtttctgacttacttccagaatgaagctcaactagaaaaatcaaggctgctcagtgatcggttctctgcagagaggcctaagggatctttctccaccttggagatccagcgcacagagcagggggactcggccatgtatctctgtgccagcaagcttacagatacgcagtattttggcccaggcacccggctgacagtgctcgaggacctgaaaaacgtgttcccacccgaggtcgctgtgtttgagccatcagaagcagagatctcccacacccaaaaggccacactggtgtgcctggccacaggcttctaccccgaccacgtggagctgagctggtgggtgaatgggaaggaggtgcacagtggggtcagcacagacccgcagcccctcaaggagcagcccgccctcaatgactccagatactgcctgagcagccgcctgagggtctcggccaccttctggcagaacccccgcaaccacttccgctgtcaagtccagttctacgggctctcggagaatgacgagtggacccaggatagggccaaacctgtcacccagatcgtcagcgccgaggcctggggtagagcagactgtggcttcacctccgagtcttaccagcaaggggtcctgtctgccaccatcctctatgagatcttgctagggaaggccaccttgtatgccgtgctggtcagtgccctcgtgctgatggccatggtcaagagaaaggattccagaggctga

SEQ ID NO: 439 - protein, 6 aa, Artificial Sequence
  TCR Valpha CDR-3 sequence
AKNDMR

SEQ ID NO: 440 - protein, 108 aa, Artificial Sequence
  TCR Valpha sequence
NSQQGEEDPQALSIQEGENATMNCSYKTSINNLQWYRQNSGRGLVHLILIRSNEREKHSGRLRVTLDTSKKSSSLLITASRAADTASYFCAKNDMRFGAGTRLTVKPN

SEQ ID NO: 441 - protein, 127 aa, Artificial Sequence
  TCR Valpha sequence
METLLGVSLVILWLQLARVNSQQGEEDPQALSIQEGENATMNCSYKTSINNLQWYRQNSGRGLVHLILIRSNEREKHSGRLRVTLDTSKKSSSLLITASRAADTASYFCAKNDMRFGAGTRLTVKPN

SEQ ID NO: 442 - protein, 267 aa, Artificial Sequence
  TCR alpha chain sequence
METLLGVSLVILWLQLARVNSQQGEEDPQALSIQEGENATMNCSYKTSINNLQWYRQNSGRGLVHLILIRSNEREKHSGRLRVTLDTSKKSSSLLITASRAADTASYFCAKNDMRFGAGTRLTVKPNIQNPDPAVYQLRDSKSSDKSVCLFTDFDSQTNVSQSKDSDVYITDKTVLDMRSMDFKSNSAVAWSNKSDFACANAFNNSIIPEDTFFPSPESSCDVKLVEKSFETDTNLNFQNLSVIGFRILLLKVAGFNLLMTLRLWSS

SEQ ID NO: 443 - protein, 11 aa, Artificial Sequence
  TCR Vbeta CDR-3 sequence
ASSLLVGETQY

SEQ ID NO: 444 - protein, 114 aa, Artificial Sequence
  TCR Vbeta sequence
DTGVSQNPRHKITKRGQNVTFRCDPISEHNRLYWYRQTLGQGPEFLTYFQNEAQLEKSRLLSDRFSAERPKGSFSTLEIQRTEQGDSAMYLCASSLLVGETQYFGPGTRLLVLE

SEQ ID NO: 445 - protein, 133 aa, Artificial Sequence
  TCR Vbeta sequence
MGTSLLCWMALCLLGADHADTGVSQNPRHKITKRGQNVTFRCDPISEHNRLYWYRQTLGQGPEFLTYFQNEAQLEKSRLLSDRFSAERPKGSFSTLEIQRTEQGDSAMYLCASSLLVGETQYFGPGTRLLVLE

SEQ ID NO: 446 - protein, 311 aa, Artificial Sequence
  TCR beta chain sequence
MGTSLLCWMALCLLGADHADTGVSQNPRHKITKRGQNVTFRCDPISEHNRLYWYRQTLGQGPEFLTYFQNEAQLEKSRLLSDRFSAERPKGSFSTLEIQRTEQGDSAMYLCASSLLVGETQYFGPGTRLLVLEDLKNVFPPEVAVFEPSEAEISHTQKATLVCLATGFYPDHVELSWWVNGKEVHSGVSTDPQPLKEQPALNDSRYCLSSRLRVSATFWQNPRNHFRCQVQFYGLSENDEWTQDRAKPVTQIVSAEAWGRADCGFTSESYQQGVLSATILYEILLGKATLYAVLVSALVLMAMVKRKDSRG

SEQ ID NO: 447 - protein, 600 aa, Artificial Sequence
  TCR sequence
METLLGVSLVILWLQLARVNSQQGEEDPQALSIQEGENATMNCSYKTSINNLQWYRQNSGRGLVHLILIRSNEREKHSGRLRVTLDTSKKSSSLLITASRAADTASYFCAKNDMRFGAGTRLTVKPNIQNPDPAVYQLRDSKSSDKSVCLFTDFDSQTNVSQSKDSDVYITDKTVLDMRSMDFKSNSAVAWSNKSDFACANAFNNSIIPEDTFFPSPESSCDVKLVEKSFETDTNLNFQNLSVIGFRILLLKVAGFNLLMTLRLWSSGSGATNFSLLKQAGDVEENPGPMGTSLLCWMALCLLGADHADTGVSQNPRHKITKRGQNVTFRCDPISEHNRLYWYRQTLGQGPEFLTYFQNEAQLEKSRLLSDRFSAERPKGSFSTLEIQRTEQGDSAMYLCASSLLVGETQYFGPGTRLLVLEDLKNVFPPEVAVFEPSEAEISHTQKATLVCLATGFYPDHVELSWWVNGKEVHSGVSTDPQPLKEQPALNDSRYCLSSRLRVSATFWQNPRNHFRCQVQFYGLSENDEWTQDRAKPVTQIVSAEAWGRADCGFTSESYQQGVLSATILYEILLGKATLYAVLVSALVLMAMVKRKDSRG

SEQ ID NO: 448 - DNA, 1803 bp, Artificial Sequence
  TCR sequence
atggaaactctcctgggagtgtctttggtgattctatggcttcaactggctagggtgaacagtcaacagggagaagaggatcctcaggccttgagcatccaggagggtgaaaatgccaccatgaactgcagttacaaaactagtataaacaatttacagtggtatagacaaaattcaggtagaggccttgtccacctaattttaatacgttcaaatgaaagagagaaacacagtggaagattaagagtcacgcttgacacttccaagaaaagcagttccttgttgatcacggcttcccgggcagcagacactgcttcttacttctgtgctaagaatgacatgcgctttggagcagggaccagactgacagtaaaaccaaatatccagaaccctgaccctgccgtgtaccagctgagagactctaaatccagtgacaagtctgtctgcctattcaccgattttgattctcaaacaaatgtgtcacaaagtaaggattctgatgtgtatatcacagacaaaactgtgctagacatgaggtctatggacttcaagagcaacagtgctgtggcctggagcaacaaatctgactttgcatgtgcaaacgccttcaacaacagcattattccagaagacaccttcttccccagcccagaaagttcctgtgatgtcaagctggtcgagaaaagctttgaaacagatacgaacctaaactttcaaaacctgtcagtgattgggttccgaatcctcctcctgaaagtggccgggtttaatctgctcatgacgctgcggctgtggtccagcggctccggagccacgaacttctctctgttaaagcaagcaggagacgtggaagaaaaccccggtcccatgggcaccagcctcctctgctggatggccctgtgtctcctgggggcagatcacgcagatactggagtctcccagaaccccagacacaagatcacaaagaggggacagaatgtaactttcaggtgtgatccaatttctgaacacaaccgcctttattggtaccgacagaccctggggcagggcccagagtttctgacttacttccagaatgaagctcaactagaaaaatcaaggctgctcagtgatcggttctctgcagagaggcctaagggatctttctccaccttggagatccagcgcacagagcagggggactcggccatgtatctctgtgccagcagcttactggtgggagagacccagtacttcgggccaggcacgcggctcctggtgctcgaggacctgaaaaacgtgttcccacccgaggtcgctgtgtttgagccatcagaagcagagatctcccacacccaaaaggccacactggtgtgcctggccacaggcttctaccccgaccacgtggagctgagctggtgggtgaatgggaaggaggtgcacagtggggtcagcacagacccgcagcccctcaaggagcagcccgccctcaatgactccagatactgcctgagcagccgcctgagggtctcggccaccttctggcagaacccccgcaaccacttccgctgtcaagtccagttctacgggctctcggagaatgacgagtggacccaggatagggccaaacctgtcacccagatcgtcagcgccgaggcctggggtagagcagactgtggcttcacctccgagtcttaccagcaaggggtcctgtctgccaccatcctctatgagatcttgctagggaaggccaccttgtatgccgtgctggtcagtgccctcgtgctgatggccatggtcaagagaaaggattccagaggctga

SEQ ID NO: 449 - protein, 18 aa, Artificial Sequence
  TCR Valpha CDR-3 sequence
ATVPTDYMYSGGGADGLT

SEQ ID NO: 450 - protein, 120 aa, Artificial Sequence
  TCR Valpha sequence
NSQQGEEDPQALSIQEGENATMNCSYKTSINNLQWYRQNSGRGLVHLILIRSNEREKHSGRLRVTLDTSKKSSSLLITASRAADTASYFCATVPTDYMYSGGGADGLTFGKGTHLIIQPY

SEQ ID NO: 451 - protein, 139 aa, Artificial Sequence
  TCR Valpha sequence
METLLGVSLVILWLQLARVNSQQGEEDPQALSIQEGENATMNCSYKTSINNLQWYRQNSGRGLVHLILIRSNEREKHSGRLRVTLDTSKKSSSLLITASRAADTASYFCATVPTDYMYSGGGADGLTFGKGTHLIIQPY

SEQ ID NO: 452 - protein, 279 aa, Artificial Sequence
  TCR alpha chain sequence
METLLGVSLVILWLQLARVNSQQGEEDPQALSIQEGENATMNCSYKTSINNLQWYRQNSGRGLVHLILIRSNEREKHSGRLRVTLDTSKKSSSLLITASRAADTASYFCATVPTDYMYSGGGADGLTFGKGTHLIIQPYIQNPDPAVYQLRDSKSSDKSVCLFTDFDSQTNVSQSKDSDVYITDKTVLDMRSMDFKSNSAVAWSNKSDFACANAFNNSIIPEDTFFPSPESSCDVKLVEKSFETDTNLNFQNLSVIGFRILLLKVAGFNLLMTLRLWSS

SEQ ID NO: 453 - protein, 11 aa, Artificial Sequence
  TCR Vbeta CDR-3 sequence
ASSLVRLDGYT

SEQ ID NO: 454 - protein, 114 aa, Artificial Sequence
  TCR Vbeta sequence
DTGVSQNPRHKITKRGQNVTFRCDPISEHNRLYWYRQTLGQGPEFLTYFQNEAQLEKSRLLSDRFSAERPKGSFSTLEIQRTEQGDSAMYLCASSLVRLDGYTFGSGTRLTVVE

SEQ ID NO: 455 - protein, 133 aa, Artificial Sequence
  TCR Vbeta sequence
MGTSLLCWMALCLLGADHADTGVSQNPRHKITKRGQNVTFRCDPISEHNRLYWYRQTLGQGPEFLTYFQNEAQLEKSRLLSDRFSAERPKGSFSTLEIQRTEQGDSAMYLCASSLVRLDGYTFGSGTRLTVVE

SEQ ID NO: 456 - protein, 309 aa, Artificial Sequence
  TCR beta chain sequence
MGTSLLCWMALCLLGADHADTGVSQNPRHKITKRGQNVTFRCDPISEHNRLYWYRQTLGQGPEFLTYFQNEAQLEKSRLLSDRFSAERPKGSFSTLEIQRTEQGDSAMYLCASSLVRLDGYTFGSGTRLTVVEDLNKVFPPEVAVFEPSEAEISHTQKATLVCLATGFFPDHVELSWWVNGKEVHSGVSTDPQPLKEQPALNDSRYCLSSRLRVSATFWQNPRNHFRCQVQFYGLSENDEWTQDRAKPVTQIVSAEAWGRADCGFTSVSYQQGVLSATILYEILLGKATLYAVLVSALVLMAMVKRKDF

SEQ ID NO: 457 - protein, 610 aa, Artificial Sequence
  TCR sequence
METLLGVSLVILWLQLARVNSQQGEEDPQALSIQEGENATMNCSYKTSINNLQWYRQNSGRGLVHLILIRSNEREKHSGRLRVTLDTSKKSSSLLITASRAADTASYFCATVPTDYMYSGGGADGLTFGKGTHLIIQPYIQNPDPAVYQLRDSKSSDKSVCLFTDFDSQTNVSQSKDSDVYITDKTVLDMRSMDFKSNSAVAWSNKSDFACANAFNNSIIPEDTFFPSPESSCDVKLVEKSFETDTNLNFQNLSVIGFRILLLKVAGFNLLMTLRLWSSGSGATNFSLLKQAGDVEENPGPMGTSLLCWMALCLLGADHADTGVSQNPRHKITKRGQNVTFRCDPISEHNRLYWYRQTLGQGPEFLTYFQNEAQLEKSRLLSDRFSAERPKGSFSTLEIQRTEQGDSAMYLCASSLVRLDGYTFGSGTRLTVVEDLNKVFPPEVAVFEPSEAEISHTQKATLVCLATGFFPDHVELSWWVNGKEVHSGVSTDPQPLKEQPALNDSRYCLSSRLRVSATFWQNPRNHFRCQVQFYGLSENDEWTQDRAKPVTQIVSAEAWGRADCGFTSVSYQQGVLSATILYEILLGKATLYAVLVSALVLMAMVKRKDF

SEQ ID NO: 458 - DNA, 1833 bp, Artificial Sequence
  TCR sequence
atggaaactctcctgggagtgtctttggtgattctatggcttcaactggctagggtgaacagtcaacagggagaagaggatcctcaggccttgagcatccaggagggtgaaaatgccaccatgaactgcagttacaaaactagtataaacaatttacagtggtatagacaaaattcaggtagaggccttgtccacctaattttaatacgttcaaatgaaagagagaaacacagtggaagattaagagtcacgcttgacacttccaagaaaagcagttccttgttgatcacggcttcccgggcagcagacactgcttcttacttctgtgctacggtcccgactgactacatgtattcaggaggaggtgctgacggactcacctttggcaaagggactcatctaatcatccagccctatatccagaaccctgaccctgccgtgtaccagctgagagactctaaatccagtgacaagtctgtctgcctattcaccgattttgattctcaaacaaatgtgtcacaaagtaaggattctgatgtgtatatcacagacaaaactgtgctagacatgaggtctatggacttcaagagcaacagtgctgtggcctggagcaacaaatctgactttgcatgtgcaaacgccttcaacaacagcattattccagaagacaccttcttccccagcccagaaagttcctgtgatgtcaagctggtcgagaaaagctttgaaacagatacgaacctaaactttcaaaacctgtcagtgattgggttccgaatcctcctcctgaaagtggccgggtttaatctgctcatgacgctgcggctgtggtccagcggctccggagccacgaacttctctctgttaaagcaagcaggagacgtggaagaaaaccccggtcccatgggcaccagcctcctctgctggatggccctgtgtctcctgggggcagatcacgcagatactggagtctcccagaaccccagacacaagatcacaaagaggggacagaatgtaactttcaggtgtgatccaatttctgaacacaaccgcctttattggtaccgacagaccctggggcagggcccagagtttctgacttacttccagaatgaagctcaactagaaaaatcaaggctgctcagtgatcggttctctgcagagaggcctaagggatctttctccaccttggagatccagcgcacagagcagggggactcggccatgtatctctgtgccagcagcttagtacggttggatggctacaccttcggttcggggaccaggttaaccgttgtagaggacctgaacaaggtgttcccacccgaggtcgctgtgtttgagccatcagaagcagagatctcccacacccaaaaggccacactggtgtgcctggccacaggcttcttccccgaccacgtggagctgagctggtgggtgaatgggaaggaggtgcacagtggggtcagcacggacccgcagcccctcaaggagcagcccgccctcaatgactccagatactgcctgagcagccgcctgagggtctcggccaccttctggcagaacccccgcaaccacttccgctgtcaagtccagttctacgggctctcggagaatgacgagtggacccaggatagggccaaacccgtcacccagatcgtcagcgccgaggcctggggtagagcagactgtggctttacctcggtgtcctaccagcaaggggtcctgtctgccaccatcctctatgagatcctgctagggaaggccaccctgtatgctgtgctggtcagcgcccttgtgttgatggccatggtcaagagaaaggatttctga

SEQ ID NO: 459 - protein, 13 aa, Artificial Sequence
  TCR Valpha CDR-3 sequence
  MISC_FEATURE (4)..(4): Xaa is any amino acid
  MISC_FEATURE (5)..(5): Xaa is Pro, Ser, or Thr
AVRXXTSGTYKYI

SEQ ID NO: 460 - protein, 13 aa, Artificial Sequence
  TCR Valpha CDR-3 sequence
  MISC_FEATURE (4)..(4): Xaa is Asp, Glu, Ser, Thr, Asn, Gln, Cys, Gly, Pro, Ala, Val, Ile, Leu, Met, Phe, Tyr, or Trp
  MISC_FEATURE (5)..(5): Xaa is Pro, Ser, or Thr
AVRXXTSGTYKYI

SEQ ID NO: 461 - protein, 13 aa, Artificial Sequence
  TCR Valpha CDR-3 sequence
  MISC_FEATURE (4)..(4): Xaa is Gly, Ala, Cys, Ser, Thr, Val, Asp, or Glu
  MISC_FEATURE (5)..(5): Xaa is Pro, Ser, or Thr
AVRXXTSGTYKYI

SEQ ID NO: 462 - protein, 13 aa, Artificial Sequence
  TCR Valpha CDR-3 sequence
  MISC_FEATURE (5)..(5): Xaa is Pro, Ser, or Thr
AVRGXTSGTYKYI

SEQ ID NO: 463 - protein, 13 aa, Artificial Sequence
  TCR Valpha CDR-3 sequence
  MISC_FEATURE (4)..(4): Xaa is Gly, Ala, Cys, Ser, Thr, Val, Asp, or Glu
AVRXPTSGTYKYI

SEQ ID NO: 464 - protein, 13 aa, Artificial Sequence
  TCR Valpha CDR-3 sequence
AVRGPTSGTYKYI

SEQ ID NO: 465 - protein, 11 aa, Artificial Sequence
  TCR Vbeta CDR-3 sequence
  MISC_FEATURE (4)..(4): Xaa is Leu or Phe
  MISC_FEATURE (5)..(5): Xaa is Val or Leu
  MISC_FEATURE (6)..(6): Xaa is Ser, Gln, Asn, or Ala
  MISC_FEATURE (8)..(8): Xaa is Asn or Glu
  MISC_FEATURE (9)..(9): Xaa is Glu or Thr
  MISC_FEATURE (11)..(11): Xaa is Phe or Tyr
ASSXXXGXXQX

SEQ ID NO: 466 - protein, 11 aa, Artificial Sequence
  TCR Vbeta CDR-3 sequence
  MISC_FEATURE (6)..(6): Xaa is Ser, Gln, Asn, or Ala
  MISC_FEATURE (8)..(8): Xaa is Asn or Glu
  MISC_FEATURE (9)..(9): Xaa is Glu or Thr
  MISC_FEATURE (11)..(11): Xaa is Phe or Tyr
ASSLVXGXXQX

SEQ ID NO: 467 - protein, 11 aa, Artificial Sequence
  TCR Vbeta CDR-3 sequence
  MISC_FEATURE (6)..(6): Xaa is Ser, Gln, or Asn
ASSLVXGNEQF

SEQ ID NO: 468 - protein, 12 aa, Artificial Sequence
  TCR Vbeta CDR-3 sequence
  MISC_FEATURE (4)..(4): Xaa is Leu or Phe
  MISC_FEATURE (5)..(5): Xaa is Val or Leu
ASSXXAGETQYF

SEQ ID NO: 469 - protein, 11 aa, Artificial Sequence
  TCR Vbeta CDR-3 sequence
ASSLVSGNEQF

SEQ ID NO: 470 - protein, 13 aa, Artificial Sequence
  TCR Valpha CDR-3 sequence
AVRCPTSGTYKYI

SEQ ID NO: 471 - protein, 13 aa, Artificial Sequence
  TCR Valpha CDR-3 sequence
AVRSPTSGTYKYI

SEQ ID NO: 472 - protein, 13 aa, Artificial Sequence
  TCR Valpha CDR-3 sequence
AVRTPTSGTYKYI

SEQ ID NO: 473 - protein, 13 aa, Artificial Sequence
  TCR Valpha CDR-3 sequence
AVRVPTSGTYKYI

SEQ ID NO: 474 - protein, 13 aa, Artificial Sequence
  TCR Valpha CDR-3 sequence
AVREPTSGTYKYI

SEQ ID NO: 475 - protein, 11 aa, Artificial Sequence
  TCR Vbeta CDR-3 sequence
ASSLVNGNEQF

SEQ ID NO: 476 - protein, 13 aa, Artificial Sequence
  TCR Valpha CDR-3 sequence
  misc_feature (4)..(5): Xaa can be any naturally occurring amino acid
AVRXXTSGTYKYI

SEQ ID NO: 477 - protein, 13 aa, Artificial Sequence
  TCR Valpha CDR-3 sequence
  MISC_FEATURE (4)..(4): Xaa is Ala, Ile, Leu, Val, Pro, Gly, Cys, Met, Ser, Thr, Asp, or Glu
  MISC_FEATURE (5)..(5): Xaa is Ser, Thr, or Pro
AVRXXTSGTYKYI

SEQ ID NO: 478 - protein, 11 aa, Artificial Sequence
  TCR Vbeta CDR-3 sequence
  MISC_FEATURE (4)..(4): Xaa is any amino acid
  MISC_FEATURE (5)..(5): Xaa is any amino acid
  MISC_FEATURE (6)..(6): Xaa is any amino acid
  MISC_FEATURE (8)..(8): Xaa is any amino acid
  MISC_FEATURE (9)..(9): Xaa is any amino acid
ASSXXXGXXQF

SEQ ID NO: 479 - protein, 11 aa, Artificial Sequence
  TCR Vbeta CDR-3 sequence
  MISC_FEATURE (4)..(4): Xaa is Ala, Ile, Leu, Val, Pro, Gly, Phe, Tyr, or Trp
  MISC_FEATURE (5)..(5): Xaa is Ala, Ile, Leu, Val, Pro, or Gly
  MISC_FEATURE (6)..(6): Xaa is Ser, Thr, Ala, Ile, Leu, Val, Pro, Gly, Asn, or Gln
  MISC_FEATURE (8)..(8): Xaa is Asp, Glu, Asn, or Gln
  MISC_FEATURE (9)..(9): Xaa is Asp, Glu, Ser, or Thr
ASSXXXGXXQF

SEQ ID NO: 480 - protein, 15 aa, Artificial Sequence
  TCR Valpha CDR-3 sequence
AVHSNAGGTSYGKLT

SEQ ID NO: 481 - protein, 117 aa, Artificial Sequence
  TCR Valpha sequence
SGEDQVTQSPEALRLQEGESSSLNCSYTVSGLRGLFWYRQDPGKGPEFLFTLYSAGEEKEKERLKATLTKKESFLHITAPKPEDSATYLCAVHSNAGGTSYGKLTFGQGTILTVHPN

SEQ ID NO: 482 - protein, 136 aa, Artificial Sequence
  TCR Valpha sequence
MEKMLECAFIVLWLQLGWLSGEDQVTQSPEALRLQEGESSSLNCSYTVSGLRGLFWYRQDPGKGPEFLFTLYSAGEEKEKERLKATLTKKESFLHITAPKPEDSATYLCAVHSNAGGTSYGKLTFGQGTILTVHPN

SEQ ID NO: 483 - protein, 276 aa, Artificial Sequence
  TCR alpha chain sequence
MEKMLECAFIVLWLQLGWLSGEDQVTQSPEALRLQEGESSSLNCSYTVSGLRGLFWYRQDPGKGPEFLFTLYSAGEEKEKERLKATLTKKESFLHITAPKPEDSATYLCAVHSNAGGTSYGKLTFGQGTILTVHPNIQNPDPAVYQLRDSKSSDKSVCLFTDFDSQTNVSQSKDSDVYITDKTVLDMRSMDFKSNSAVAWSNKSDFACANAFNNSIIPEDTFFPSPESSCDVKLVEKSFETDTNLNFQNLSVIGFRILLLKVAGFNLLMTLRLWSS

SEQ ID NO: 484 - protein, 11 aa, Artificial Sequence
  TCR Vbeta CDR-3 sequence
ASSADRGSPLH

SEQ ID NO: 485 - protein, 113 aa, Artificial Sequence
  TCR Vbeta sequence
DAGVTQSPTHLIKTRGQHVTLRCSPISGHKSVSWYQQVLGQGPQFIFQYYEKEERGRGNFPDRFSARQFPNYSSELNVNALLLGDSALYLCASSADRGSPLHFGNGTRLTVTE

SEQ ID NO: 486 - protein, 132 aa, Artificial Sequence
  TCR Vbeta sequence
MGPGLLCWVLLCLLGAGPVDAGVTQSPTHLIKTRGQHVTLRCSPISGHKSVSWYQQVLGQGPQFIFQYYEKEERGRGNFPDRFSARQFPNYSSELNVNALLLGDSALYLCASSADRGSPLHFGNGTRLTVTE

SEQ ID NO: 487 - protein, 308 aa, Artificial Sequence
  TCR beta chain sequence
MGPGLLCWVLLCLLGAGPVDAGVTQSPTHLIKTRGQHVTLRCSPISGHKSVSWYQQVLGQGPQFIFQYYEKEERGRGNFPDRFSARQFPNYSSELNVNALLLGDSALYLCASSADRGSPLHFGNGTRLTVTEDLNKVFPPEVAVFEPSEAEISHTQKATLVCLATGFFPDHVELSWWVNGKEVHSGVSTDPQPLKEQPALNDSRYCLSSRLRVSATFWQNPRNHFRCQVQFYGLSENDEWTQDRAKPVTQIVSAEAWGRADCGFTSVSYQQGVLSATILYEILLGKATLYAVLVSALVLMAMVKRKDF

SEQ ID NO: 488 - protein, 606 aa, Artificial Sequence
  TCR sequence
MEKMLECAFIVLWLQLGWLSGEDQVTQSPEALRLQEGESSSLNCSYTVSGLRGLFWYRQDPGKGPEFLFTLYSAGEEKEKERLKATLTKKESFLHITAPKPEDSATYLCAVHSNAGGTSYGKLTFGQGTILTVHPNIQNPDPAVYQLRDSKSSDKSVCLFTDFDSQTNVSQSKDSDVYITDKTVLDMRSMDFKSNSAVAWSNKSDFACANAFNNSIIPEDTFFPSPESSCDVKLVEKSFETDTNLNFQNLSVIGFRILLLKVAGFNLLMTLRLWSSGSGATNFSLLKQAGDVEENPGPMGPGLLCWVLLCLLGAGPVDAGVTQSPTHLIKTRGQHVTLRCSPISGHKSVSWYQQVLGQGPQFIFQYYEKEERGRGNFPDRFSARQFPNYSSELNVNALLLGDSALYLCASSADRGSPLHFGNGTRLTVTEDLNKVFPPEVAVFEPSEAEISHTQKATLVCLATGFFPDHVELSWWVNGKEVHSGVSTDPQPLKEQPALNDSRYCLSSRLRVSATFWQNPRNHFRCQVQFYGLSENDEWTQDRAKPVTQIVSAEAWGRADCGFTSVSYQQGVLSATILYEILLGKATLYAVLVSALVLMAMVKRKDF

SEQ ID NO: 489 - DNA, 1821 bp, Artificial Sequence
  TCR sequence
atggagaaaatgttggagtgtgcattcatagtcttgtggcttcagcttggctggttgagtggagaagaccaggtgacgcagagtcccgaggccctgagactccaggagggagagagtagcagtctcaactgcagttacacagtcagcggtttaagagggctgttctggtataggcaagatcctgggaaaggccctgaattcctcttcaccctgtattcagctggggaagaaaaggagaaagaaaggctaaaagccacattaacaaagaaggaaagctttctgcacatcacagcccctaaacctgaagactcagccacttatctctgtgctgtgcattctaatgctggtggtactagctatggaaagctgacatttggacaagggaccatcttgactgtccatccaaatatccagaaccctgaccctgccgtgtaccagctgagagactctaaatccagtgacaagtctgtctgcctattcaccgattttgattctcaaacaaatgtgtcacaaagtaaggattctgatgtgtatatcacagacaaaactgtgctagacatgaggtctatggacttcaagagcaacagtgctgtggcctggagcaacaaatctgactttgcatgtgcaaacgccttcaacaacagcattattccagaagacaccttcttccccagcccagaaagttcctgtgatgtcaagctggtcgagaaaagctttgaaacagatacgaacctaaactttcaaaacctgtcagtgattgggttccgaatcctcctcctgaaagtggccgggtttaatctgctcatgacgctgcggctgtggtccagcggctccggagccacgaacttctctctgttaaagcaagcaggagacgtggaagaaaaccccggtcccatgggccctgggctcctctgctgggtgctgctttgtctcctgggagcaggcccagtggacgctggagtcacccaaagtcccacacacctgatcaaaacgagaggacagcacgtgactctgagatgctctcctatctctgggcacaagagtgtgtcctggtaccaacaggtcctgggtcaggggccccagtttatctttcagtattatgagaaagaagagagaggaagaggaaacttccctgatcgattctcagctcgccagttccctaactatagctctgagctgaatgtgaacgccttgttgctgggggactcggccctgtatctctgtgccagcagcgccgacagggggtcacccctccactttgggaacgggaccaggctcactgtgacagaggacctgaacaaggtgttcccacccgaggtcgctgtgtttgagccatcagaagcagagatctcccacacccaaaaggccacactggtgtgcctggccacaggcttcttccccgaccacgtggagctgagctggtgggtgaatgggaaggaggtgcacagtggggtcagcacggacccgcagcccctcaaggagcagcccgccctcaatgactccagatactgcctgagcagccgcctgagggtctcggccaccttctggcagaacccccgcaaccacttccgctgtcaagtccagttctacgggctctcggagaatgacgagtggacccaggatagggccaaacccgtcacccagatcgtcagcgccgaggcctggggtagagcagactgtggctttacctcggtgtcctaccagcaaggggtcctgtctgccaccatcctctatgagatcctgctagggaaggccaccctgtatgctgtgctggtcagcgcccttgtgttgatggccatggtcaagagaaaggatttctga

SEQ ID NO: 490 - protein, 5 aa, Artificial Sequence
  TCR Vbeta CDR-1 sequence
SGHKS

SEQ ID NO: 491 - protein, 6 aa, Artificial Sequence
  TCR Vbeta CDR-2 sequence
YYEKEE
